United States Patent Application Publication US 2026/0191916 A1 - sequence listing, part 12

SEQ ID NO: 13 - DNA, 2223494 bp, Streptococcus salivarius
  source 1..2223494: mol_type = genomic DNA
atgaccgaaaaagagcattttttttggaataagctcttagagctggccaaagaggaactaacacaagccacttttgattattatgtcctagataccaagctcatcaaagttcaagataacgttgctacaattctgcttgaggaagtcaaaaagctattctgggaaaagaatatgcaatctttcattttgatggctggttttgaagcctataatagtgaaatcaaagttgagtacgtctttgacgaagcactcttaaacgaggcaaattcaactgtaacaaacaatgactttggcaataaaaaggaacagcaaacacctgctcttcctacattggactctgacttgaatagtaagtacacctttgataattttattcagggggatgaaaaccgttggtcagttgctgcatctttagctgtagctgattcaccaggagctacgtataaccctctatttatttatggaggacctggtctcggaaaaactcacttactcaatgccattggtaacaaggtcttacatgataatcctcaagcacgtatcaaatacattactgcagagaatttcattaatgaatttgttgtccatatccgtttagataaaatggatgaactaaaacttaaataccgtcatctggacgttctcttaattgatgatattcaatcattggctaaaaaatcaacgcaagccactcaagaggaatttttcaatactttcaatgtccttcacaataataataaacaaattgtcctgaccagcgaccgtaatccagatcaattgaacgagatggaagagcgtcttgtcacgcgctttaaatgggggttaaccgttaatatcacaccacccgactttgaaacgcgagtggccattcttactaataagattatggactatgattatcattttcctcctgaaacaattgagtatttagctggccaatttgattcaaatgtccgtgacttagaaggggccttaaaagatattagcttagttgccaatgttcgccagttagatactatcacagttgaagtagctgccgaagccattcgcgcacgtaaaatggatggtcctaaattaactcttattccgattgaggatatccaaactgaggtaggaaaattttataatgtcactgtaaaagagatcaaggcaactaaacgaacacaaaatattgtcttggcacgtcaggtagccatgtatcttgcgcgtgaaatgactgataactcccttccaaaaattggaaaagaatttggcggaagagatcactcaactgtcttacatgcatacaataaaatcaaaaatatgattgctcaagatgacagtttacgcattgaaattgataccatcaaaaacaagataaaatgacacttgtggataactattaaaaattatccaaacttttccacaggctgtgcacaagtttaaagccttgataaaactatgttttgtagacttatgcacagtgtccacaagacctactactactactaaaataatactaataaaataaaggagcatcatgattcaatttgcgattaataaagcttatttcttacaagcacttcatacaactcgccgtgctatttcttctaaaaatgctatcccaattctatcaacgattaaaatcgaagttaccaaagatggtatctatttgacaggatcaaatgggcaaatctcaattgaaaatagtatctcagtttcagaagaaaatgcaggcctattaattacgcagccaggtagtatccttttggaagcaaactttttcattaatgttgtctcaagcttgcctgatgttacccttacttttgaagaaatcgaacaataccaagttttactgaaaagtggtaaatcagaaattaccttgaaagggaaagatgtcgaacaatatccccgtattcaggaagttgatagcttgacgccattactcatggacacaaaagtgttaaaatctatcattgctgaaacttcattcgcagcaagcacacaagaaagtcgtccaattttaactggggttcactttgttctttcaaatcataaagatctcaaagctgtagcaacagactctcaccgaatgagccaacgtcaacttgttttggagcattctgcggataactttgatgttgtaatcccaagtcgctcacttaaagaattatcggcagtctttagcgatgatattgaaaacttagaggttttcttctcagcaaatcaaattctattccgtagtgaaacaatttctttctatacacgtctacttgaaggaaattatccagacacgaatcgtctcttgtctgattcatttgaaacagaagttgttttcgagactgctagccttcgttctgctatggaacgttcatatttgatttctaatgctagtcaaagtggtaccgtcaaactcgaaatcatcaatggcagtgtcagtgcccatgttaattcaccagaagtcggaaaggtgaatgaggatattgatgtgcaagatgtttctggtagtgatttggtcattagtttcaacccaacctacctaatagatgctttgaaagctcttaagagtgagactgtccgtgtacgtttcatttcaccggtgcgtccatttactttgacgccagcagatgacagtgagaattttattcaattgattacacctgtaagaacaaactaaaatcgaaaaagttatccactgtggataacttttttactagagagggagtttatgtaccaaattggaagtttagttgaaatgaaaaaaccacatgcttgtaccataaaagcaacaggaaaaaaagctaatgaatgggaagtgacccgtcttggagctgacattaagattcgttgtacgaattgtgatcatgtggttatgatgagtcgtcatgatttcgaaaagaaacttaagaaggttttataacagacattggggagtctatataatgaggttcttgtgttaagaaaattagtttactagcaatataaaaactttctagagtccctaattatcttctttatagcattctttgccttgctttcctttttatgattctcaaagggaagttgcctatttttaacaatttttgtgttataattaactgaattacttttttatggagaaataaattaatggctttaacagcaggtatcgttggtttgccaaacgttggtaaatcaactcttttcaatgcaattacaaaagcgggtgcggaagctgctaactatcctttcgcgacaattgatccaaacgtcggaatggttgaggtaccagacgagcgtttgacgaaactgactgaacttattacccctaaaaagacagttccaaccacatttgagttcacagatattgcgggtatcgtaaaaggagcatcaaagggtgaaggtcttggaaataagttcttggcgaacattcgtgaagtagatgctattgtccatgtcgttcgtgctttcgatgatgaaaatgttatgcgtgaacaagggcgtgaggatgcctttgtagatcctatggccgatatcgatacaatcaacctagaattgattttggctgaccttgaatcaattaacaaacgttatgcgcgtgtcgaaaaaattgcgcgtacacaaaaagataaagattctgtggcagagtttaatattcttcaaaagattaaacctgttctagaagatggtaagtctgcacgtacgattgattttactgaggaagagcaaaaaattgttaagggactcttcctcttgacaacaaaaccagtactttatgtggctaacgttgatgaagaccaagtcgcaaatcctgatgatattgattatgtcaaacaaattcgtgagtttgcagcgactgaaaatgcagaagtagttgttatctcggcacgtgttgaggaagaaatttctgaattggatgatgaagacaaagaaatgttcttggaagaccttggtttgacagaatcaggagttgataaactgacacgcgcagcctatcacttgcttggtcttggaacttactttactgctggtgagaaagaagtacgtgcttggacctttaaacgcggcatcaaggctccacaagcagcaggaattatccactctgacttcgagaaaggctttatccgtgctgtaaccatgtcttacgatgatctcattaaatatggttctgagaaagctgttaaggaagctggtcgccttcgtgaagaaggaaaagaatatgttgtccaagatggcgatattatggaattccgtttcaacgtttagaaaataaaaaatagtgcacaaggctgaaaagtatttttcagtccttttgctgtttatcaaagaggagaaataatgacaaaattagtagttggcttgggaaatcctggttcaaaataccatgagacacgtcacaatgttggttttatggctattgacctaatggctaaggaactgggattaaccttttctgaagaaaagacctttaaggctgaagtggcttcgacctttttaaacggtgaaaaggtttattttgtgaaaccaacgacctttatgaatctatctggtctagctgttagagcattgctagcttattacaatattcccatggaggattttatcgttatttacgatgacttagatatggaagttgggaaactgcgctttcgtcaaaaaggttcagcaggtggtcataatgggattaaatctattattgctgaaactggcactcaagaatttaaccgtataaaaattggtattggtcgcccacagaaaggaatgacggtcgttaatcatgtccttggaaaatttagtgaagatgattatgccacaattttactgactttagacaaggtagagacggccctcaatcattaccttaaaaccaatgatttcgaagacaccatgaggcgttataatggctaataccctattagatctttttgagaagaatcctcaattgcttgagtggcgtgataaagtaactttattgagtagacagttggttatgggattttctggttccagcaaggcagttgtcatggcatctgccctttctgagcaggttcctaagattctaatcgttacttcaacacaaaatgaagctgagcaactaacaggagatttgtcagctatcttaggagaggataaggtttattctttttttgcagatgatgtagtagctgcagagtttatcttcgcttctccagaaaagacccattctcgtctcgaaagtcttaattttttaatagataaagaggccagtggggttttggtcacgagtttagttgggactaagttacatttgcctaaccctaaggtttataaagactctcgtattaacttagcactaggggaagaacatgatttagaggctctcagtaagcatctgactcatattggataccaaagggtagagcaggttctctcacctggtgagtttagtcgtaggggcgatattttagatatctatgaactgactgcagaactcccctaccgtttagaattttttggagacgagattgatggtattcgtcagtttgatagcgatagtcaaaaatctttagacaatttagagcatgttatcgtatctccggcagatgatattatcttaacaagagaagattaccaacgtgctgagaaggccctagaaagtgcggtctcgaaggcagaaggtcctcataaagcttaccttgaggaagttctgtcagttacgattgatggttaccgtcataaagatttacgtaagtttttatctctcttttatgataaagcttacaccttatttgactaccttccaaagggaactcctgtattcattgatgattttcaaaagatagtggaccgccatggacgtcttgagttggaagtggctaatcttttaactgaggatcttcatcagggcaagtctctgagtcatctaaattacttagtggattcatttaagactttacgtaactatcagccagctagtttcttttcgaattttcataagggattgggaaatcttaaatttgataagttgtatcaattcacgcaataccctatgcaagagttctttaaccagttcccacttctagttgatgaaatacatcgctataccaagaataaggcaacagttattttacaagtggggtctgagaagcagctcaaatctttgaaggaaaccttggaagaatatgatttagatttaccccttagtagttttggagatttgatccctcataagcctcagttagtcttaggaaacttatccaatggtttttactttgcggatgaaaagcttgttcttgtcactgaacgtgagatttttcataaaaaagtaaaacgtcgtgcgcgtgccagtcacgtttccaatgcagagcgtctcaaagattacaatgaacttgaaaaaggtgattatgttgtacaccagactcatggtatcggtcaatttaaaggtattgagactattgagattaaaggggtgcatcgtgactacttgaccatccaatatcaggatgctgcaacaatttctctacctgttgagcagattgagagtctctctaagtatgtatcagcggacggaaaagagcctaaaattaataaactcaatgatgggcgttttcaaaagactaaacaaaaagtaagcaagcaagtagaggatattgccgatgatctcttaaaactttatgctgagcgtagtcaacttaaaggttttgctttttcaccagatgatgataaccaaagggatttcgaagatgattttacctatgctgagacagaggatcaattgcgttctatcaaggaaattaaggcagacatggagtcagacaaacccatggatcgtctcttggttggtgatgttggttttggtaagacagaggtagctatgcgtgctgccttcaaggcggtcaatgatggaaagcaagttgctatcctagttcctacaacagttcttgcccaccagcattatttgaattttaaagaacgttttgaaaatcatgctgttgaggtagatgaactcagtcgttttagaagtaaaaaagagcaaaatgagactattgaaaatttagctaaagggcgtattgatattattatcggtacccaccgcctgctgtccaaagatgttaagttttctgacttaggcttgctagtaattgatgaagaacaacgttttggcgtgaagcataaagagaaacttaaggagttgaaggctagggttgatgtacttacgctaactgcgacacctattcctcgtacgcttcatatgtctatgttaggtattcgtgatttgtcgattattgagacagcacctaccaaccgttatccagttcaaacttatgttatggaaaccaatcctggtcttattcgagaagcgatattaagagagatggaccgaggcggccagattttttatgtttataatcgtgttgaaaccattgatcaaaaagtttctgaactacatgagctagtccctgaagcacgtatcggatttgttcatggtcagatgagtgaggttatgttggagaataccctcttggatttcttgaatggtgattacgatgttttggtagcaacgaccattatcgagacagggattgatatctccaacgttaatacgctctttattgagaatgcagatcatatgggcttatctactctttatcagttgagaggtcgtgtggggcgtagtaatcgaattgcttatgcctatctcatgtatcgtcctgacaaagtgttgacggaagtttctgagaagcgattggatgctattaagggatttacagaactgggatcaggtttcaaaattgccatgcgtgatttatcaattcgtggtgccgggaacattcttggtgcttctcaaagtggtttcatcgactcagtcggattcgaaatgtactcgcaactcttggaagaggctatcaataaacgtcaaggtaaaactcaagttcgccgtaaaggaaatgcagagttcaatcttcagattgatgcttacctcccttctgactatatttctgacgagcgccaaaaaattgaaatttataagcgtattcgagaaattgagaatcagaaagactatcaagaccttcaagatgagcttattgaccgctttggagaatatccagaccaagttgcctatctcattgagattggtctggttaaggcctatttggatgctgcctttgcagaattagtcgagcgtaagaacgatactattattgttcgtttcgaaaaagcctctcttaaattcttcttgactcaagactatttcgaagccatctctaaaacgcatttaaaagcaaaaatcagtgataaccaagggaaagtagagattacttttgatgttcgtaacaagaaagactatgagattcttgaagaattaaaaatttttggacagacatttatggaaatcaaagaacgtaaagaaaaaaaagaagcttaaggaaagtttaagtaagtctctctatactataaaatatcctaaaacttttctttttcataaatctcctgagagggtcgactagtgtcgattctcttatttttgtacttgaaaaggctttagtcacctattttctcaaaaaaatgctatcatagaagagatatcctaacgaaaaggaaacagtaacattgagattagacaaatatttaaaagtatcacgaattatcaaacgccgtccagttgctaaagaagtagctgataaaggacgtataaaagtaaatggagtactcgctaagtcatctacagatttaaaaattggtgaccaagtggaagttcgttttggaaataaacttttaactgtccgtgttttagaaatgaaagacagtactaaaaaagaagatgcggcaaaaatgtacgagattataagtgaaacaaggattgaagcagatgagcaagaagcctaatattgtacagcttacgaacgattacattgataatgccaatcaagagcaacgattagagcgtgccgaacacgaacaaaggaatcgctttatggggtggattctttttgtggttgttttactctttatcttgccaacctataatctggttgagacctatatgaatatcaaacagcaagagaaggaagtcttgtcgcttcagaaagactatgataaattgtcggatcagacaaaggaacgaaaggatttggctaagaaacttaaggatgatgctttcgccgagaaatatgcgcgtgctaagtactattattcacgtgaaggagagtcaatctatcctgtaccaagcttattaccctaatgaaagatttactaaaaactgtagaaacttttttaacctattcagaagccaagttagaggaactatcagaaaaaaatcagcaacttaaaatggaattaccgaggaaagaggaggtgaagaagcaagcatgaaaaagctcttaatagctgcaactgttgtgcttgtatcttctagccccctagtcttacttcctatggagaaggagctaactctgacccaaaaacaggtccaaaaattgactcaaaatactacagctagtttggctcaatttaaacagattcctaaaaatccaagaacgataacaactatcctaacttataagaacaaggatttaacagaatttaaaaccagtatccaagcggataccaaactatcaatttctgctattttttggaatgctaaaggtgagcctgttttccaacttcaagatggtgattatgtagccgctagtcagaaatcaattgtagacgacagtatctataatgaaaaaccagtagatatgaccttatggactaaagatggtttaacggtatacaaagaaccttacgttttaggaactgaaaaagctgactccaaactcgctagttttaaacccattaaggttagccaagcagctcagacgcatgcagggacctactatttggtagacggtgaggggtggatcaacgcttctgatttatcaacgactgacaatcgcatcgaggctgttcaaaaagtccttaatgagaagtataacaatcaagagcgcatctcagtttatgttaaacagcttgatacggaccgagtagctgctatcaatgacgaaaaaagcatgtatgcagcaagcgtagccaagcttggagtactctattatgcacaggaacgtctgtctcaaaaaaaattatcattatcagatgagtatcaatataccgcagctgtgaatggttttccaggtgcctatgatccagatggttctggaaagattagtaagatacctgatgataagaattatagcttggaaaatctgttaaaggctgtagcccaaaactcagataatgtagcgacaaatatattaggttattatgtaaccaatcagtatgacaaggccttccaaaaatcagtagataaagccgcagcgacttcgtggaatatggataaaaaggagttgactgctagagccgcaggtactttgatggaggctgtttatagacaaaatggagatattatcaattatctttcaagtacggactatgatggcgaacgtatttccaaaaacattgatgtgcctgtcgctcataaaattggtgatgcctacgactttaaacatgacgtcgctattgtttatgcagattctccctttattctatcgatttttacggataaagagggctatgacaaaatcacctcaattgcagatgatgtttatggaattttaaaataatgacacaaaaattgttgcaaatgatgcaagccaagggttattttaaccagcacaagaaaattttagtagcagtatcaggtggagcagactctatgagtttgctgtactttttgtataaccatcaaaaagatttggatattcagttggggattgctcacgttaaccataaacaacgacaagagtcggagcatgaagaagcgtatttacgtcattgggcagaggaacataaggtcccttttcactatagtgccttctcaggaaagttttcagaaaatgctgcccgtacctttcgctatgagttttttaagcgggtcatgaaagattatgattactctgctcttgtaacagcccatcatgcagatgatcaagcagagacgatttttatgagactgttgagaggaagtcgtttaagacacctgacaggaatttcagctatcagaccatttggcactggtcagattattcgtccctttttgcatcttacgaaagatcagcttcccgtaactttccattttgaagataggagtaatacgtcattagcctatcttcggaatcgcatcagactatcctatcttcctaccttatctcaggaaaatcctaaatttaaggagcacctttgtcttttagccgaggagattggtcttatgaagcaagctttaggggagttaacaaaggatattactatcactgatttatctgtttttcagcaacagtcagatcctgtccagctctttctttttcagaactatttagatacctttcctgatttacagctttctaaaggccaatttaatcaattgataagttatctaagaaaaaatggttcagggaagatacccctaaaaaatggttacgaactaataaaaacacagacttctttcctaataaggaaagaagaggctatctctttatcccctccttgtctcttagaatttggaaaatctgttgagtttgaggattacaccttgactttttcagaattcaatgacgtttctaactcagatactattagtatttggtcagattccccaatactgattcgtcatagaaaagaaggcgataagattgaccttggtagtcaccataaaaaattaagacgactgtttatagacaataagattttagagaaggatcgtcaaaaagccattataggagaacaagatggtcagattatttttctttatgttgctgggcgtctctatttgaaaaaaagacctgaaaatgctatactttatggcactgtagtcatttataagaatttctaatcaaataccatgttcaaataacgatgattgaagtaaaagtggtataataacagaatattgacttcgagaaagggaacccaaatgttagaaaaagacattaaaaaagtcctcttttcccaagaggatatcgtagctaaaactaaagaactaggacaacaattgacagaggattatgcggggaaaaatcctttactagtctgtgttttgaaaggtgctgttccatttatggcagaacttatcaaacatatcgatacccatattgagatggactttatggtcgtttcaagttatggtggtggaactgtcagcagtggtgaagtaaagattcttaaagatgttgacactaatgttgaaggacgagacatcatctttattgaagatatcattgacacaggtcgtacgctcctttatcttcgagatatgttcaagtaccgtaaagccaattcagtcaaaatcgcaactctttttgataaaccagaaggtcgtgttgttgatattgaggcagattacgtatgttacgatgttcctaatgaatttatcgttggtttcggactagactatgatgaaaaataccgtaacctcccttatgtcggtgtcctaaaagaagaaatttatacaaaataagtaaaggtctaattaatttatgaataataaaaataataatggcttcttacggaacgcttttctctacatcatagttattattgcggttgtaaccggagtacaatactttgcaggaggaagccaaagcccaagtcaacaattgtcttacacacagttggttaagaaaattgaagatggtaaggtaaaatctatcacttatcagccagacggtagtatcattgaagttaaaggtagctacaaaaaggccgaaaaggttgatactgatcttagtctaccatttttaggtagtgcatcatcagagacacgtagctttacatcgactgtgctgcagaatgaaacaaccatgcagaaattgcagtcagcatcagaagcagctgatgttaatgttaaaatgatacgtgaaagttcaagtggtgcttggatttcatatctttttagttacctacctttgattgggattgctattttcttccttttcatgatgaaccaaggtggtaaccgcggtgcaatgaattttggccgcaaccgtgctaagactcaatcaaaagagaatattaaagttcgtttcacagatgtggctggtgcagaagaagaaaaagaagaacttgtagaagtcgtagatttcctcaaaaatccacgtaaatataaagcacttggtgcacgtatccctaagggtgttctccttgaaggccctccagggacaggtaaaactctgcttgctaaagctgttgctggtgaagcagatgttccattctttagtatctcaggttctgatttcgtagagatgtttgtcggtgtcggagcaagtcgtgttcgtagtctttttgaagacgctaagaaggccgaacgtgctattatctttattgatgaaatcgatgcggttggccgtcgtcgtggtactggaatgggtggcggtaacgacgaacgtgaacaaacccttaaccaactgttgatagaaatggatggttttgatggaaatgagaatatcattgtcattgctgcaaccaaccgcagtgatgttcttgatccagccctcctacgtccaggacgttttgaccgtaaagttcttgttggtcgcccagatgtaaaaggccgagaagctatcttgaaagtccatgccaagaataaaccattggctgaagatgttgaccttaaagttgttgctcaacaaactccaggttttgttggagctgacttagaaaatgtcttgaatgaagcagccctagttgctgcacgacgtagtaagactagaattgatgctagtgatatcgacgaagcagaggatcgtgttattgctggaccatctaagaaagaccgccaagtttcagaacacgaacgtaaagttgtggcttaccatgaagcaggtcatacaattgttggtttaacactttctagcgctcgtgatgttcacaaggttactattgttccacgaggccgcgcaggtggttatatgatttctctaccaaaagaggatcagatgttgtcatctaaagatgagctaaaagaacaattggcaggacttatgggtggacgtgttgcagaagaaattattttcaacgttcaaacctcaggcgcttcaaatgactttgagcaagcaacacagttagcacgtgcaatggttactgaatatggtatgagcgaaaaacttggaccagtccaatatgaaggtaatcatgcgatgaatccaggacaatttacgacagataagtcttactcagctcatacagctcaacttattgacgaagaaattcgatcacttttagttgaagcacatgacaaagcagctgaaattatcaatgcaaaccgagaaacacatgcactcattgcagaagctttgcttaagtatgaaacacttgatgctgcacaaatcaagtcaatttatgagactggtaagatgccggaggattctcttggagattcagaagaagataatcatgccctatcttacgatgaagtcaaagaaagaattgaaaataaaaataaagatgaagaagagtaaggagttttactcttctttttttagataaatcgagagaagaagtactattagaaagtattataaaaaaaagaaaattaaaatcaatgcaaattattgacaagacaggtcagagatgatattataaataagctgtttcgcgagagacagcagacacgagaagtaaaaaaacttcaaaaaagtgttgacaaggcattctagatttgctagaatatagaagttgtcttaagagagacaaagacctttgagaactgaataagaaaccaagtgcagggttatgatagaagaattataacctgtcaatttacaagaataaatcgtcagacgacggtaatgagttaacgctcgaacaattattaaaatttttaatgagagtttgatcctggctcaggacgaacgctggcggcgtgcctaatacatgcaagtagaacgctgaagagaggagcttgctcttcttggatgagttgcgaacgggtgagtaacgcgtaggtaacctgccttgtagcgggggataactattggaaacgatagctaataccgcataacaatggatgacacatgtcatttatttgaaaggggcaattgctccactacaagatggacctgcgttgtattagctagtaggtgaggtaacggctcacctaggcgacgatacatagccgacctgagagggtgatcggccacactgggactgagacacggcccagactcctacgggaggcagcagtagggaatcttcggcaatgggggcaaccctgaccgagcaacgccgcgtgagtgaagaaggttttcggatcgtaaagctctgttgtaagtcaagaacgagtgtgagagtggaaagttcacactgtgacggtagcttaccagaaagggacggctaactacgtgccagcagccgcggtaatacgtaggtcccgagcgttgtccggatttattgggcgtaaagcgagcgcaggcggtttgataagtctgaagttaaaggctgtggctcaaccatagttcgctttggaaactgtcaaacttgagtgcagaaggggagagtggaattccatgtgtagcggtgaaatgcgtagatatatggaggaacaccggtggcgaaagcggctctctggtctgtaactgacgctgaggctcgaaagcgtggggagcgaacaggattagataccctggtagtccacgccgtaaacgatgagtgctaggtgttggatcctttccgggattcagtgccgcagctaacgcattaagcactccgcctggggagtacgaccgcaaggttgaaactcaaaggaattgacgggggcccgcacaagcggtggagcatgtggtttaattcgaagcaacgcgaagaaccttaccaggtcttgacatcccgatgctatttctagagatagaaagttacttcggtacatcggtgacaggtggtgcatggttgtcgtcagctcgtgtcgtgagatgttgggttaagtcccgcaacgagcgcaacccctattgttagttgccatcattcagttgggcactctagcgagactgccggtaataaaccggaggaaggtggggatgacgtcaaatcatcatgccccttatgacctgggctacacacgtgctacaatggttggtacaacgagttgcgagtcggtgacggcaagctaatctcttaaagccaatctcagttcggattgtaggctgcaactcgcctacatgaagtcggaatcgctagtaatcgcggatcagcacgccgcggtgaatacgttcccgggccttgtacacaccgcccgtcacaccacgagagtttgtaacacccgaagtcggtgaggtaaccttttggagccagccgcctaaggtgggatagatgattggggtgaagtcgtaacaaggtagccgtatcggaaggtgcggctggatcacctcctttctaaggaaaaacggaatgtacttgagtttcttatttagttttgagaggtcttgtggggccttagctcagctgggagagcgcctgctttgcacgcaggaggtcagcggttcgatcccgctaggctccattgaatcgaaagattcaagtattgtccattgaaaattgaatatctatatcaaattccatatgtaattaaatacatatagatagtaacaagaaaataaaccgaaacgctgtgaatatttaatgagttaggtcgaaagaccaaaataaggttaagttaataagggcgcacggtggatgccttggcactagaagccgatgaaggacgtgactaacgacgaaatgctttggggagctgtaagtgagcaatgatccagagatgtccgaatgggggaacccggcaggtaatgcctgtcactcattactgttaaggtaatgtagaggaagacgcagtgaactgaaacatctaagtagctgcaggaagagaaagcaaaagcgattgccttagtagcggcgagcgaaacggcaagagggcaaaccgaagagtttactcttcggggttgtaggactgcaacgtggacttaaagattatagaagaactacctgggaaggtaggccaaagagagtaatagcctcgtattcgaaatagtctttatacctagcagtatcctgagtacggcgagacacgagaaatctcgtcggaatctgggaggaccatctcccaaccctaaatactctctagtgaccgatagtgaaccagtaccgtgagggaaaggtgaaaagcaccccgggaggggagtgaaatagaacctgaaaccgtgtgcctacaacaagttcgagcccgttaatgggtgagagcgtgccttttgtagaatgaaccggcgagttacgatatgatgcgaggttaagttgaagagacggagccgtagggaaaccgagtcttaatagggcgcattagtatcatgtcgtagacccgaaaccatgtgacctacccatgagcaggttgaaggtgaggtaaaactcactggaggaccgaaccagggcacgttgaaaagtgcttggatgacttgtgggtagcggagaaattccaaacgaacttggagatagctggttctctccgaaatagctttagggctagcgtcgatgttaagtctcttggaggtagagcactgtttgggtgaggggtccatcccggattaccaatctcagataaactccgaatgccaacgagatataatcggcagtcagactgcgagtgctaagatccgtagtcgaaagggaaacagcccagaccaccagctaaggtcccaaaatatatgttaagtggaaaaggatgtggggttgcacagacaactaggatgttagcttagaagcagctattcattcaaagagtgcgtaatagctcactagtcgagtgaccctgcgccgaaaatgtaccggggctaaaacatattaccgaagctgtggatacctttataggtatggtaggagagcgttctatgtgcgaagaaggtgtaccgtgaggagtgctggagcgcatagaagtgagaatgccggtatgagtagcgaaagacaggtgagaatcctgtccaccgtaagactaaggtttccaggggaaggctcgtccgccctgggttagtcgggacctaaggagagaccgaaaggtgtatccgatggacaacaggttgatattcctgtactagagtatatagtgatggagggacgcagtaggctaactaaaccagacgattggaagtgtctggccaagcagtgaggtgtgatatgagtcaaatgcttatatctataacattgagctgtgatggggagcgaagtttagtagcgaagttagtgatgtcacactgccgagaaaagcttctagcgttaattatactctacccgtaccgcaaaccgacacaggtagtcgaggcgagtagcctcaggtgagcgagagaactctcgttaaggaactcggcaaaatggccccgtaacttcgggagaaggggcgctgacttatggtcagccgcagtgaataggcccaagcaactgtttatcaaaaacacagctctctgctaaatcgtaagatgatgtatagggggtgacgcctgcccggtgctggaaggttaagaggagtgcttagcaatagcgaaggtatgaattgaagccccagtaaacggcggccgtaactataacggtcctaaggtagcgaaattccttgtcgggtaagttccgacccgcacgaaaggcgtaatgatttgggcactgtctcaacgagagactcggtgaaattttagtacctgtgaagatgcaggttacccgcgacaggacggaaagaccccatggagctttactgcagtttgatattgagtatctgtaccacatgtacaggataggtaggagcctatgacctcgggacgccagtttcgagtgaggcgttgttgggatactacccttgtgttatggctactctaacccagataggttatccctatcggagacagtgtctgacgggcagtttgactggggcggtcgcctcctaaaaggtaacggaggcgcccaaaggttccctcagaatggttggaaatcattcgcagagtgtaaaggtataagggagcttgactgcgagagctacaactcgagcagggacgaaagtcgggcttagtgatccggtggttccgcatggaagggccatcgctcaacggataaaagctaccctggggataacaggcttatctcccccaagagttcacatcgacggggaggtttggcacctcgatgtcggctcgtcgcatcctggggctgtagtcggtcccaagggttgggctgttcgcccattaaagcggcacgcgagctgggttcagaacgtcgtgagacagttcggtccctatccgtcgcgggcgtaggaaatttgagaggatctgctcctagtacgagaggaccagagtggacttaccgctggtgtaccagttgttctgccaagagcatcgctgggtagctatgtagggaagggataaacgctgaaagcatctaagtgtgaagcccacctcaagatgagatttcccatgattttatatcagtaagagccctgagagatgatcaggttgataggttagaagtggaagtgtggtgacacatgtagcggactaatactaatagctcgaggacttatccaaagaaagtaactgagacatattgacaacgatttggtttcttgatacagtatagatattcaattttgagttgagaatactcagagttaagtgacgatagcctaggagatacacctgttcccatgccgaacacagaagttaagccctagtacgcctgatgtagttgggggttgccccctgttagatatggtagtcgcttagcgcatagggagtttagctcagctgggagagcatctgccttacaagcagagggtcagcggttcgatcccgttaactcccataggtcccgtggtgtagcggttatcacgtcgccctgtcacggcgaagatcgcgggttcgattcccgtcgggaccgtcaagtagaaatatttgagactcgttagctcagttggtagagcaattgacttttaatcaatgggtcactggttcgagcccagtacgggtcatatatgcgggtgtggcggaattggcagacgcaccagatttaggatctggcgcttaacggcgtgggggttcaagtcccttcacccgcattagaaaagttagccggcttagctcagttggtagagcatctgatttgtaatcagagggtcgcgtgttcaagtcatgtagccggcataaaatgcgaacgtagttcagtggtagaacaccaccttgccaaggtgggggtcgcgggttcgaatcccgtcgttcgcttgaggagccggggtggcggaactggcagacgcacaggacttaaaatcctgcgaaaggaaactttcgtaccggttcgatcccggtcctcggcataataaaataatgagcacccttagctcaactggatagagtacctgactacgaatcaggcggttagaggttcgactcctctagggtgcattttatcgggaagtagctcagcttggtagagcacttggtttgggaccaaggggtcgcaggttcgaatcctgtcttcccgatttatggcggtgtagctcagctggctagagcgtccggttcatacccgggaggtcgggggttcgatccccttcgccgctatatatatggatttcttggacctttagctcaactggttagagcactcggctcataaccgagcggtcgtaggttcgagtcctacaaggtccatatattaattataatatttggaggattacccaagtccggctgaagggaacggtcttgaaaaccgtcaggcgtgtaaaagcgtgcgtgggttcgaatcccacatcctccttataattaacgcgggatggagcagctaggtagctcgtcgggctcataacccgaaggtcgtaggttcaaatcctgctcccgcaatatggctcggtagctcagttggtagagcaatggattgaagctccatgtgtcggcggttcgattccgtctcgcgccattttattaagcgggtgtagtttagtggtaaaactacagccttccaagctgttgtcgcgagttcgattctcgtcacccgctttatttggatattatagccaagcatttgcttgggcgcgtagctcagatggttagagcgcacgcctgataagcgtgaggtcggtggttcgattccactcgtgcccatattggagaattactcaagaggctgaagaggacggtttgctaaatcgttaggtcgggtaactggcgcgggggttcgaatcccccattctccgtagtattatgacgaattatcttttagataattcgttttcttttttttgaggtgacaaaatgaaaaatagtttttatcgatttcttctttatgggtttattattattctattttttgtaatgcttttttcttttgtctttactaataaaaaattaacgaaggatatctcttttaatgtatctggtttggttacaaaagtagactctgttgtttcagttccatttactgcactatcaaaatctcacaatgtgctttctgatcttttatcaacttattctgagaatcgtgatttaaaaaaatctttatcaaatttagaaaatcaatcggctattatttctaacttgcaagaagagaatgattctttaagagcatctcttaatctttcggacaagctaagtcgtgataatgttctcactgctgaagtttctatgagaccttctgtgacttggttaaaagagttaactattaatgtgggtaagtctaagaatgttagtaaatctatgctagcaacttctaatggtggagttattggatttgtaactaaagtttataatgatacaacaactatttctttactttctagtagttctagtgatagctaccttgcatctagtgttaaatcagaggacgataatcagattttcgggattatatcacgttatgacaataaaaagaagctattagagatgacacaactcaattcatcttctaacgttaaggtcggcactgtagtagtcacaagtggtcttgatgatgtatcagtaaaggatgttccaattggtactgtagactctgttattgattatgaaggaaatcgtacgattttggtaaaaccttatgctgattttgataaaatttcttatgttactttagttggagatggtaaataatatgaaattgtccaagtattctattattcctttcttactgagtattgtcccttttctatgggatggtcatatttctatgatacttaatcattatttatcccctgaattttttctatcatctcatctttttattatttatattttcatcttaactcttgattttccaaataagtatgcatttctttaccttatttgttttggatttctttatgatacctattatttcaaaacagttggtatagtgattctaactctgccactgttatgctatctgttaactcagctaggacgaattgttaagagaaatacctatgttgattttttgttaatgtttttattcttatttctctttgataccataaattttggctttgccttattctatggtttctccaatgagtctgtgactgattttattatttatcaactaagtcctagtatagtgtttaatcttttgatctttatctttattaaacctattcttgaaaaattatttttgtatctgtcagttgatagatttaaatagaactgtaatattggcgtaacaaagtttgcgccattttttgatacaataaaaaggtcttatcgaaaaggagtagtattttatattatgaaaaaacgtattctttcagcagtgttggtaagtggtgtaaccttatcagcagctgcatcagtacatgcagaggattatgattcgcaaatcgctgctgcagataacgcaattagtaaccttgcttctcaacaagagactgcacaagcgcaagttgctacaatccaatctcaagtatctacacttagaacacaaaaatcagatttggaaactaaaaatgctgaacttgaaaaagtatcagcagatttggaatctgaaattcaagaattatcaagtaaaattgtagctcgtcaagattctttggcgaaacaagctcgtagtgctcaacaaaataatactgcgactagctacatcaactctatcttgaactctaagtcaatctctgaagctattactcgtatcacagctatttcaaaagttgttacagctaataatgacatgttgacaaaacaagagtctgatcaaaaagagcttgctgcaaagcaagaacaaaaccaagctgctattaatgaaattgcaactaataaagctgagcttgaaacaacagaagctggtttgacaactcaacaagctgaactagaagcagcacaagttactttggctgcagaattggctacagcacaagatgaaaaaacatcacttgtttctgctaaatcaactgcagaagctgtggcagcttcaactgcagcatcagttgctcagtctcaagcaattgcagaatcagaggcagcagcacaagcagtagcatcttcagaagcggcagcatttgtagctcaatcagaggcggcagcaacttcagaagctgtagctcaaccttctgaagctactgtttcagaaacagcaacagcctcagaagtagcacaagaacctgtttcatcagaaacttcagaaacaactcaagagccaactgttgcaacttcagaagcaacacaagagcctgaagcacagccagaatcagctgcctcagaggcacaacaagagcctgctgctccagcaacatctgaagcacaaccagaatcagctgctcctgcagcttcagaagcaccagctcctgctagcgaagcacctgcagcaacttcagaagcaccagcaagtcaagcacctgcagcttcagaagcaccagctccagcagctgaaacacctaaggtatcagctgcctcaactcctaatacatatcctgttggtcaatgtacttggggtgctaaatcattagcttcatgggttggtaactactggggtaatgctaaaaactggattgctagcgcacaagcagctggccactcagttggtacaactcctgtagccggagcaattgcggtttggccaaatgatggtggtggttatggtcacgtagcttacgtcacatcagcatcaagtgcaaattcaattcaagttatggaatcaaactatgcaggtaacatgtcaatcggtaactaccgtggtacatttgatccaacatcttcagctcatggtggttctgtatactatatttacccataatgactacaaaaaggcgattcgaattttctcgaatcgtttttattttatagcaaaatgtctttactttctggaattacttttagacgggaaaatgtcgaggttaaggttaaatctttttagtcttgttaagttactgtgacaccatttattttgcattgaaaatcaatctaaaaaaaggtagaatggtttagtagatattttggaggaaatcatgtcttatacgaatttgaagttgtttgctttatcgtctaaccaggaattagcagcaaaagttgctgataaaatgggtattgaactcggaaaatcaagtgttcgtgaattttcagatggtgagattcaagttaatattgaagaatctatccgtggtcatcacgtttttattcttcaatctacaagctctcctgtaaatgataacttgatggaaatcttgattatggttgatgcgctaaaacgtgcaagtgcagaaacggtcagtgttgttatgccttattatggttatgcacgtcaagaccgtaaggcacgttcacgtgagccaatcacatctaaattggttgctaatatgcttgaggttgcaggtgttgatcgacttttgacagttgacctccatgcttctcaaattcaaggattctttgatattcctgtagaccatttgatgggggcaccacttatcgcagattactttgatcgtgctggtcttactggagatgatgttgttgttgtttctccagaccatggtggtgtgactcgtgcacgaaaacttgctcaatgtttgaaaacaccaatcgcaatcattgataaacgtcgtagtgttgataaaatgaacacttctgaggttatgaatatcattggtaacgttgaaggtaaaacatgtatcttgattgatgatatgattgatactgcaggtacaatatgtcatgcggcggatgcgcttgctgaagctggtgcaactcatgtctatgcctcatgtactcaccctgtattgtcaggtccagcacttgataatattcaaaaatctgctattgagaagcttgtcgtattggacacgatttatcttccagaagaacgtttgattgataagattgaacaaatttcaattgctgatttgatttcagaggcaattattcgtattcatgaaaaacgtccattgtcacctttgtttgaaatgggccataaatagactaaagctagcctaggctagctttttttggtgtttaaatgcgtttgagtttttgatataatgtaaggcataattgcaaagaggtgacagtgatggatttaacacaacgttttaataaaaatttagataagattgaagtttcgatgattcgtcagtttgaccaatcaatttcagatgtaccaggtatcaaaaagttgacacttggtgaacctgattttacgactccagatcatgtgaaagaagcagctaaagctgctatcgatgctaaccagtctcactatacaggtatggcaggacttcctgctttgcgtcaagctgcggcagattttgttaaggaaaaatataatcttacttataatccagataatgaaattttggtgactattggagctacagaagccctttctgcaacattgacggctattttggagccaggagatacgattcttttacctgcaccagcctatcctggatatgaaccgattgcaaatctagttggtgctgaaattgttgaaattgatacaacagctaatgattttgttttgactccggagatgttagaaaaggcaattttggagcagggagataagcttaaagcagttttgcttaactacccaactaacccaacaggtgtgacttactcacgtcaacagattaaagatttagctgaagttctgaaaaaatacgatatttttgttgttagcgatgaagtttactctgagctaacttatgtggaccaacatgtatctattgctgagtatttgccagaacaaacgattttgattaatggtttgtctaaatctcatgcgatgacgggctggcgtattggtttgatttttgcacctgcagtcttgacggctcagttgattaagagtcaccagtatttggtaacagctgcagctactatggcacaatttgcagctattgaagccttatctgctggtaaagatgatgcccaaccaatgaaagttgagtatttgaagcgtcgtgattatattcttgaaaaaatgactgaacttggtttcaaaattattaaacctgatggtgctttctatatctttgctaagattccagaaggctatactcaagattcctttaagttctgtcaagactttgctcgtgaaaaagctattgcgattatcccaggggttgcttttgggaagtatggcgaaggctatgttcgtttgtcgtatgcagctagcatggatactattgaaacagctatggctcgtttgaaagagtttatggaagaacatgcagaagcttgagagtagagggcttgtcctcttcaatcgtaattatcgtgagaacgataagctagttaagatttttaccgagcaagctggtaaacggatgttttttgttagaggtggtgggtcaggtaaattaagtgctgtgattcaacctttaaccatcgctgaattcatgatgactgtaaatgatgagggcttatctttcatagaggattatagccaggcagagtccttcaaggaaattacaagcgatattttcaagctgtcttatgcgacttatttagctgctctgacggatgctgctattgctgacggtgtagcagatgcacaattatttgcattcttggagaagacgcttgaattaatggaagaaggcttggattatgaaatcttgactaatatctttgagattcaggttttagaccgtttcggtgtacgattgaattttcacgagtgtgtcttttgccatcgtgtgggccttccttttgatttttcgtataagttctcggggctactttgtccaaatcattatgcagaggatgaaaggcgtagtcacttagatcctaatgtaccttatcttttagattgttttcaggggctttcttttgaggaattgagaagcatatctgttaaggatgacatgaaacgaaagctacgacattttattgatgacctctatgataattatgttggaatacatcttaaaagtaagaagtttattgataatctaaattcttggggtcatattatgaataaagaagatagtgctgactagacattatcttctttttgtttcacgtgaaacaggaaagtaatggttttcagtctcaggggttaaaatgcaagtcagttcgtgctataataagaagataataagctgaaagactctgctagaaacagggaactagtctattttagttacataatattttattgatagaaatctgagtttatgttttatggcagaggacaagagggagaatgctatgcatgtaattgcagtagatgctatgggtggcgataatgcgccacaagcaattgtagagggtgtcaaccaagctatagcagatttcaaagatattgaaatccagctttatggtgatgaagctaaaattaagacctatttgacagcgaatgaacgtgtgagcattgtgcatactgatgaaaagataaattcggatgatgagccagctaaagccattcgtaagaagaaaaaagcttcaatggtcttaggtgcacaggctgttaaggagaaaaaagcaggtgccgtgatttctgcgggaaatacaggtgcccttctggctgcaggtctctttgtggtcggacgtattaagggagttgagcgtccaggtcttatgtcaacaatgccaagttttactggtcaaccctttgatatgcttgatttgggtgctaatgcggaaaatacagctagtcatttgcatcaatatgctattttaggatctttctatgctaaaaatgtgcgtggaattgccaaccctcgtgtaggtctccttaataatgggactgaggaaacaaagggggatagtcttcgtaaggaggcttttgagctcttatctaaggagccaagtattaactttgttggtaatgttgaggcgcgtgaaattatgtctggagctgctgatgtggtcgtagctgatggtttcaccggaaatgcagttcttaaggcaatcgaaggaacgggacttggtgctatgaagacccttaagtcagctatcatgaatggtggtcttaaagctaagttaggtgccttcctattgaaggatagtctaaaaggtatgaaagagactatggattactctagcgccggaggtgcggttctctttggtcttaaagctcccgtagtaaaatgtcatggatctagtgatgctaaggcagtttactacactattaagcaggttcgtacgatgcttgatactaaggttgttgagcagctagttgaagcctttagtccgaaagaggaggctaactgatgagtagagtagaaattcttcagaaaatgcagctcgtgattcaagagcagatgggtaaagaggatattgttttagtcgaagaaaccaaattagatgacttgggtgtagattcaatagagcttatggaattcattattaatttggaggatgagtttgctcttgagatttccgatgatactattgaccatatggttaaggtagctgatttgttggactatttgtctgagaaattgaataaagaataagaaagctagagttagataagagtataatagttgtgtattatatgattgttattttgtgggagtgaggcaagaaactaaatgttatatggatttagttctgtcacactccttttttctatacattttttattaggaaactctaaaaaagaatcaaaagacgaacgtttttttttactaaagtaataaagtttgctatatattggtttttggattctggtgtggtataattaggaagaataaacttgaaaggcgaacaataccatgtcaaaccaactaatttatactggtaaagctaaagatatttatagtacagaagacgaaaatgtgattaagtcggtctataaggaccaagcaactatgcttaatggtgctcgtaaggagactattaagggaaagggtgtgctaaataatcagatttcgtctcttatttttgaaaaattgaatgctgcgggtgtagctactcactttatcgaacgtatttctgacacagaacaactcaacaagaaagtgaaaatcattcctttggaggttgttcttcgtaacgtgactgcgggttctttttctaaacgttttggcgtggaagaaggtttggacttaaaaactcctatcgttgaattttactataagaacgatgatttggatgatccattcatcaatgatgagcatgtgaagttcttggatattgccaatgatgaacaaattgcttatatcaaggaagaaacgcgtcgtatcaatgaattgctgaaagattggtttgcacaaattggtcttcgtttgattgacttcaaattggaattcggttttgataaggatggcaaaattatcttggcagatgaattttcaccagataactgccgcctttgggatgctgaagggcaccatatggacaaggatgtcttccgtcgtgatcttggtagcttgacagatgtttatgaagttgtattggaaaaattgcaaggattgaagtagccttttacaaatagaatacttggtcttcactacaatctttaagtagaaatagataaaggaaataaaatggataaacgtattttcgttgagaaaaaagctgattttcgtgtgaaatctcagtctttagtaaaagaattaaagcataatcttcagttgaaaactttgaatgatcttcgtattgttcaggtttacgatgtctttaatttggcagaggacttgtttgcgcgtgcggaaaaacacatcttctctgagcaagtgactgatactgttttggacgaggctgcggttaaggctgatcttgagaagtatgctttctttgctatcgaaagtttgcctggtcaatttgaccaacgtgcagcatcttcacaagaagctttgcttttgcttggtagttcaaatgacgtaacagtgaacacagcgcaattgtacttggttaacaaggatatcgatgcgaatgagttggaagctgtcaaaaactaccttttgaacccagtggattctcgtttcaaagatatcactgttggtattgctaaacaggatttctctgagtctgacaagaccattccaagcttggatttctttgaaacttatacggcagaagattttgctaagtataaggcagagcagggattggccatggaagtggatgaccttctcttcattcaagattacttcaagtctattggacgtgtgccaactgagactgagcttaaggttttggatacttactggtctgaccactgccgtcacacaacttttgagactgagttgaagaatatcgacttctcagcatctaaatttgaaaaacaattgcaagcgacttatgacaaatatattgccatgcgtgatgagttgggacgtacagaaaaacctcaaaccttgatggatatggcgactatttttggtcgctatgagcgtgctaatggtcgtttggatgacatggaagtgtctgatgaaatcaatgcttgctcagttgaaattgaagtggatgtcaatggtgtgaaagaaccatggcttctcatgttcaagaacgaaactcacaaccacccaactgagattgaaccatttggtggagcggctacttgtatcggtggtgccattcgtgacccattgtcagggcgttcatacgtttaccaagccatgcgtatctcaggtgctggtgatattacaacaccaattgctgaaactcgtgctggtaaattgccacaacaagtgatttctaaaacagcggctcacggttattcttcatacggtaaccaaattggtcttgcaacaacttacgttcgtgaatacttccacccaggtttcgttgctaagcgtatggagctaggtgcagttgtcggtgcggctcctaaggaaaatgttgtccgtgagaaacctgaagcaggtgatgtgattatcttgctcggtggtaagactggacgtgatggtgtcggtggtgcgacaggctcttctaaagttcaaacggttgaatctgttgaaacagctggtgctgaggttcaaaaagggaatgccatcgaagaacgtaagattcaacgtcttttccgtaatggggatgtgacacgtctgatcaagaaatcaaatgactttggtgctggtggtgtctgtgtggctatcggtgaattggcagatggtcttgagattgatctagacaaagtgccattgaaataccaaggtttgaacggtacagaaattgccatctctgaatctcaagaacgtatggctgtagtggttcgtccagaagatgtagatgctttcgttgctgaatgtaacaaagaaaatattgatgctgttgtcgttgcgacagtaactgaaaaaccaaatcttgtcatgcactggaatggtgaaaccatcgttgatttggaacgtcgtttccttgatacaaacggtgtacgtgtggttgtagatgctaaggtggttgacaaggatgtcaagcttccagaagaacgtcaaacatctgctgaaacccttgaagctgatactcttgaagtcttggctgaccttaaccatgccagtcaaaaaggtttacaaaccatctttgatagttcagttggtcgttcaacagtcaatcacccactcggtggtcgctaccaaatcacaccaacggaagcttctgtacagaaattgccagtccaacatggcgtgacaacaactgcttctgttatggcgcaaggattcaacccttatgtagcagaatggtctccatatcatggcgctgcctatgcagtaatcgaagcaacagctcgtttggttgctgctggtgcaaactggtctaaggctcgcttctcttatcaggaatacttcgagcgtatggataaacaagcggagcgctttggtcaaccagtatcagctctccttggatcaatcgaagctcagattcaacttggtttgccatctatcggtggtaaagactctatgtctggtacctttgaagaattgacagtaccaccaaccttggttgcttttggggtaacaactgcggatagctgtaaggttctttctccagaattcaaagctgcgggtgaaaatatttactacattcctggtcaagctttggcacaagaaattgactttgatctcatcaagtctaactttgctaagtttgaagccatccaagctgattataaagtcacatctgcatcagctgtcaaatatggtggtgtggttgaagcgcttgcccttgcaacatttggtaaccatattggtgccactgtaacccttgaaaatcttgagactgccttgacagctcaattgggtggattcatcttcacatctccggaagagatttcaggtgttgccaagattggacaaacagcagctgactttacacttactgtcaatggtgtaacgcttgatggacacaagcttgacagtgccttccaaggtaaattggaagaggtttacccaacggaatttgcacaggcaactgagttggaagaagtacctgctgtagcatcagatgctgtgatcaaagcaaaagaaacagttgaaacaccagtggtttacatcccagtattcccaggtactaactcagaatatgactccgctaaggcctttgaaaaagaaggtgcaaaagtcaacttggtaccatttgtcacactaaatgaagaagctattgtcaagtctgttgacaccatggttgacaatatcgaaaaagctaacattatcttctttgcaggtggtttctcagcagcggatgaaccagatggatcagctaaatttatcgttaacatcttgcttaatgaaaaagtacgtgcagccattgatagcttcatcgaacgtggtggtttgattattggtatctgtaacggattccaagcccttgttaaatcaggtcttcttccatacggtaactttgaagatgcaagcagcacgagtccaaccctcttctacaatgatgccaaccaacacgtggctaagatggtggaaacacgtattgccaacactaactcaccatggcttgccggagtagaagttggtgacatccatgccatcccagtatcacacggtgaaggtaaatttgtcgtgacagctgaggaatttgcagagcttcgtgacaatggtcaaatctttacccaatatgttgacttcaaaggtaaaccaagcatggattcaaaatacaatcctaacggatctgtaaatgctatcgaaggtatcacaagtaagaacggtcaaattattggtaagatgggtcactcagaacgtttcgaagatggtctcttccaaaatattccaggaaataaagaccaacatctctttgcatcagcggttaaatactttactggaaaataatagagtgccaagtgcactcagtaatgatatttttcaatgtagcagtagttctaaagagcttgaaaacttgagttcacattagtgaaatgagaggctaggaacagtttttcgtttgcataacattaggaaaatatcaaaaataaaaggtataaaaaatgacatacgaagttaaatctcttaatgaagaatgtggtgtttttggtatctggggtcacccggatgctgccaaattaacttatttcggacttcacagtctccaacaccgtggtcaagagggagcagggattctctcaaatgatgcgggtcaattgaagcgtcatcgtgatatggggcttctctcagaagttttccgtgatccagccaacttggacaagctaactggaacggctgctatcggtcatgttcgttatgcgactgctggtgaagcttctgtagataatattcaacctttcttgtttaagttttatgacaatcagtttggacttgcccacaacgggaacttgaccaatgcagagtcacttagacgtgagttggaaaaaaatggggcaatctttaactcaacatctgactcagaaattttggctcacttgattcgtcgtagccacaacccatcctttatgggcaaggtgaaagaagccttgaacactgttaaaggtggatttgcttacctcctcatgcttgaggacaagctaattgcggccttggatccaaatggtttccgtcccctttctattggtaagatggccaatggagctattgtggtttcatctgaaacctgtgcctttgaagtggttggagcagagtggattcgcgatgtaaatccaggtgaggttgttatcatcgatgataatggcatcacttacgatacctatacaacggatacgcaattggctgtttgttcgatggagtatatctactttgcccgtcctgattcaaatatccaaggggtcaatgtccatacagctcgtaaacgtatgggtgctcaattggcacgtgagttcaaacatgaagcagatattgtcgttggtgtgcctaattcatcacttagcgcagccatgggatttgcggaagaatcaggcttgccaaatgaaatgggcttgattaaaaaccaatacacccaacgtacctttatccaaccaacacaagaattgcgtgagcaaggggttcgtatgaagctctctgccgtatcaggtgttgttaaaggaaaacgtgtggttatgattgacgactctattgtacgtgggacaacatcacgtcgtatcgttaatttgctaaaagaagcaggagcaacagaggtccacgtagcaatcggtagcccagcccttgcctacccatgtttctacggtatcgatattcaaacacgtaaggaattgattgcggccaatcatacagttgaggaaacacgcgaaatcattggagcggatagcttgacttacttgtctattgatggattgattgattctattggaattgacacagatgcaccaaacggtggcctttgtgtggcttactttgatggtaaatatccaacaccattgtatgactacgaagaacgctatttggaaagtttgaaagaacacacttctttctattaagagcagtgcagaagaaaaaagaggaaaaaattatgtctaaaaatgcttacgctccacgtctcactactgactaaaagctaaagcatttgtcagtagacactttgccctatggggtcaaagctagagacctgactagtatttttagataaaaagatggttcatctaaaaatacgtcgcactctttctcgaaaaaagaaaaggaataaataaaatgacaaataaaaatgcttacgctcaatcgggtgtggatgttgaagcaggttatgaagttgttgaacgtatcaaaaaacacgttgctcgtacagagcgtgcaggtgtcatgggagctctaggtggcttcggtggtatgttcgacctttcaaaaacaggtgtcaaagagcctgttttgatctcaggtacagatggtgtcggtactaaactcatgcttgctattaagtacgacaaacacgatactatcggtcaagactgtgtcgctatgtgtgttaacgatatcatcgccgcaggtgctgagcccctttacttccttgactacgtagcaactggtaaaaatgaaccagctaaattggagcaggtcgttgctggtgttgctgaaggttgtgtgcaagctggtgcagcccttattggtggtgaaactgctgaaatgcctggtatgtatggtgaagacgactatgatttggcaggtttcgcggtaggtatcgcagaaaaatctcaaatcatcgacggatcaaaagtagctgaaggtgacgtgcttcttggacttgcttcaagtggtatccactcaaatggttactcactcgtgcgtcgtgtcttttctgattacacaggtgaagaagttcttccagaacttgaaggcaaaaaacttaaagacgttcttcttgaaccaactcgtatctacgtcaaagcagctttgccactcatcaaagaagaattggttaacggtattgctcacatcacaggtggtggtttcattgaaaatgtaccacgtatgttctcagatgacttggctgctgaaattgacgaaagcaaagtgccagttcttccaattttcaaagcccttgaaaaatatggtgaaatcaaacatgaagagatgtttgaaatcttcaacatgggtattggtctcatgcttgcggttaaaccagaaaatgttgaacgtgtcaaagaacttcttgacgaacctgtttatgaaattggtcgtattgtgaagaaagatggcgcaagtgtggtgattaaataatggctaaaaggattgctgtatttgcctctggcaacggctcaaacttccaagtgattgcggaacaatttccagtagaatttgttttttcagatcaccgtgatgcctatgtcttagaacgtgccaagacccttggtgtggctagccatgcttttgaactcaaggaatttgacaataaagcagcttatgaagaagctatcgtcaaactcttgaatgaacaccagatagatttggtttgcttggccggttatatgaaaatcgtcggtccaaccttgctggcagcttatgagggccgtatcatcaatattcacccggcttatcttcctgaattcccaggtgctcatggtattgaggatgcttggaatgcaggtgttgaccagtctggtgtgactattcactgggtggattctggcgttgataccggtaaggtcatcaaacaagtccgtgtgccacgccttgaaggtgatacccttgatactttcgaaactcgcatccacgaaacagagtacaagctctatccagaagtgttggatagtttgggagttgcacgaaaataagaaagccctagagctgaaagataattttcgactgtagcagataaagaacttttttaaaaaaaggaaaagaaagaaaatgactaaacgagcacttatttcagtctcagacaaagcgggcattgttgaatttgcccaagaactcaaaaaactcggttgggacatcatctcaacaggtggtactaaagttgtccttgacaatgctggggtagacactatcgccatcgacgatgtgactggtttcccagaaatgatggacggtcgtgtgaagactctccacccaaatatccacggtggtctcctcgctcgtcgtgacctcgatagccaccttcaagcggccaaggacaataatatcgaacttatcgaccttgttgtggtaaacctttacccattcaaggaaactatcctcaaaccagacgtgacttacgctgatgcggttgaaaacatcgatatcggtgggccatcaatgcttcgttcagcagctaaaaaccacgctagcgtaacagttgtggtagaccctgctgactatgctgttgttcttgacgaattgtcagcgaacggcgaaacaagctacgaaactcgccaacgtttggcagcgaaagtataccgtcacacagcttcatacgacgctttgattgcggaatacttcacagctcaagtgggtgaaacaaaacctgaaaaactcactttgacctatgacctcaagcaaccaatgcgttatggtgaaaaccctcaacaagacgcagacttctaccaaaaaggtttgccaacggcttactcaattgcttcagctaaacagcttaacggtaaagaattgtcattcaacaatatccgtgacgctgatgccgctatccgtatcatccgtgatttcaaagaccgtccaacagttgtggctctcaaacacatgaacccatgtggtatcggtcaagctgacgacatcgaaacagcttgggactacgcttatgaagctgacccagtatcaatcttcggtggtattgtagtcctcaaccgagaagttgacgctgcgacagctaagaaaatgcacggtgtcttccttgaaatcatcattgcaccaagctacacagatgaagcgcttgaaatcttgacaactaagaagaaaaacttgcgtatccttgagttgccatttgacgctcaagacgatagtgaagtggaagcagaatacactggtgttgtaggtggtctcctcgttcaaaaccaagacgttgttaaagaaagtccagctgactggcaagtggttactaaacgccaaccaactgagacagaagcgacagctcttgagtttgcttggaaagcaatcaagtacgtcaaatcaaatggcatcatcgtgactaacgaccacatgacacttggtgttggcccaggtcaaactaaccgtgtggcttcagtccgtatcgccattgaccaagctaaagaccgtcttgatggtgctgttcttgcttcagatgccttcttcccatttgcagataacgtggaagaaatcgctaaagcaggtattaaagcaatcatccaaccgggtggatcagtccgtgaccaagagtcaatcgaagctgctgataaacatggtttgacaatgatctttacaggcgttcgtcacttccgtcactaagaatttacaaagcatccaagaatttggatgttttttagattccttaagtttcctttaagctctccaagttatactaatactatcctaaaaaacttttctttttcataaatctcctaagagctcagcacccactgggcttttttatttcagtgcatcaaaaaaacaaccgttctcacgattgttcaatagatttaaaccttttcaaggacagactgggttacccaagtcttgcgatttccgatttggacgaggatgccatcgctaggtgggtcaatggctagcactttgaagttacctggaatagtaaaggtctcaccaggattgaggtactggtctgaagttggattgccttgtccatcaacttcaagaacgggtccagggtcaacgatattgtgtttggttggtgtgcctccagctaaatcttggctggtgatggtatttcctgacacagacgtgacacggaatgttcctgtgaagcgcactgtatcaccaactttgatagaagagttagtagaatttccattttgagctcctggttcgaggtccttaaaatggatatagccagacacttgactcttatggaagctacgtttgtggtatttctcaggaccttgacccgcatcgtagttgtactcctcaatagtgacctgatcaccatgaacttccgcaacccaagcgacatgtcccatgtgaccagctccattgaccccagctgagaaccaggcgatgctccctacggcaggattcatgtctacacggtgaccattggcacgtgcgatgctgccccaagtgatggcatttccataccctacaggcagagtgaaaccattggtgttactgagacgataggctgcgaaggacgtacattgacgccagtacatggtccatggatcaacaccgaagcccccatatttccaagaggaagggtagtcatcaccgaggacagccgcctgagcagagctgccacacgaaaccgaaacagtcgctagacaagctagcggtaagagacaatatagtaattttttcttcattttaacctccacctacctattcgcagtttttcaggaaaatgaagatatttttgcgtttaagcctcacttaagctgctcaggatatactatcatcaatcctaaataacttttttcattttcataatctcccaagaggtggtccaagtggccgccttttttatgtccaaatttggatacatacccatatctccgaacaaatatgttataatggttatgtataattcgtgaaaattgctaatttttccgaatgattgtcgttaacgggcatttgcccctagtcttatttgatattgaggtatctttcaaatgaaacttttggttgttggttctggtggtcgtgaacatgcgattgccaagaaattattggagtctaaggatgttgagcaagttttcgtggctcctggtaatgacgggatgacattggacggtcttgatttgatcaatatcggaatttccgaacattctaatctgattgactttgcaaaggcgaacgatattgcttggacctttatcggtccagatgatgcccttgcggctggtatcgtggatgatttcaatgcagctggtcttaaggcttttggtccgaccaaggctgcggctgagctagagtggtctaaggatttcgctaaggaaatcatggtcaaatacgacgttccgacagcagcctatggcacattttcagatttcgaggaagccaaggcctacatcgaggaaaaaggtgctccaatcgtcgtcaaggcagacggcttggccctaggtaaaggtgtcgtcgttgctgaaacggttgagcaagccgtcgaagctgctcacgagatgcttttggacaataaattcggtgattcaggtgtgcgtgtggtcatcgaggaatttcttgacggggaagagttttctctctttgcctttgttaatggtgacaagttctacatcatgccaacggctcaggaccacaaacgtgcttatgatggggacaagggccctaacactggtgggatgggtgcctatgcgccggttcctcacttgccacagagcgtagttgacacagcggttgacactattgtcaagccagtccttgaaggtatgattaaagaaggtcgtccttacactggtgtcctttacgctggtcttatcttgacagctgacggttctaaagtcatcgagttcaactctcgctttggcgatcctgaaacgcaaatcatcttgcctcgtttgacttctgattttgcgcaaaatatcactgatattttggatggtaaagagccaactatcacatggactgacaaaggtgtgacacttggtgtggttgtagcatcaaacggctacccacttgcttatgagaaaggtgtcaagcttcctgccaagacagagggcgacatcatcacttactatgcaggtgctaaattcgctgaaaatggccaagacctcctctcaaacggcggacgtgtttacatgctggtcacaacagcagacaccgtcaaagatggtcaaaacattatttacagcgaactcaataaccaaaacacagaaggcctcttctatcgtacggatattggtagcaaggctaacaaataaaactctttgaaaatcttcgattgactgtgttaaagctccttgatgaactttagttctatcttcgtcgctttgccttgtcactctatgattttctttgagttttcgaatatcaatgctatattaggcgacgaagtcgccaatccgataatggtcgtttgatttgcgagcgttagcgagctagtataggataatcgtcgcagtagtggaactcctagtagcagagctactaggagcggaaaactggagactcaggctccagttttagtaatggaacgctacaggcggtcgcttacgtccgcactacattagacgattatcaaaaaaggagaaaaaatgaaaccagtaatttccattatcatgggctcaaaatccgactgggcaaccatgcaaaaagccgctgaagtcctcgacaacttcggcgttgcttacgaaaagaaagttgtttccgcacaccgtacaccagacctcatgtttaaacatgccgaagaagcacgtagccgtggcattaaggtcatcatcgctggtgcgggtggcgcagctcacttgccagggatggttgctgccaaaacaacccttccagtcatcggtgtaccagtcaaatcgcgtgcccttagcggtgtggattcactctattctatcgttcagatgccaggtggtgtacctgttgcaactatggctatcggtgaagctggtgcgactaacgctgccctctttgccctccgtctcctctcagtagaagacaaggccattgcggacgcacttgctaactttgctgaagaacaaggaaaaatcgcagaggagtctacaaatgagctcaactaaaaccattggtatcatcggtggtggccagctcggtcagatgatggctatctcagctatctacatgggccacaaggttatcacccttgatccagcagcagattgcccatcttctcgtgtgtctgaggttatcgtggcaccctacgatgacgtagacgcccttcgtcagttggcagaccgctgtgatgttctcacttatgaatttgaaaatgtcgacgccgacggccttgacgctgttatcaaagacggtcaacttccacaaggaacagacctgcttcgtatttcacaaaaccgtatttttgagaaggacttcctctcaaacaaggctaaagtgacggttgcgccttacaaggtcgtgacatctagccttgatttagaagatattgacctttctaaaaaatacgtcctcaagacagcgacaggtggttacgatggtcatggtcaaaaagtcatcacatcagccgacgatttggaagaggcaaatgcccttgctaactcagccgagtgtgtcttggaagagttcgtcaacttcgaccttgaaatttcagtcgtcgtgtctggtaacggcaaggatgtgacagttttcccagttcaggaaaatatccaccgcaacaatatcctctctaaaaccattgtgccagctcgcatttcagaaagtctagctgaaaaagcgaaagctatggctgtgaagattgctgagcaacttaacctctctggcactctctgtgtggaaatgtttgcgacagctgatgacatcatcgtcaacgaaatcgcaccacgtccacacaattcagggcactactcaatcgaagcctgcgacttttcacagtttgacacgcatatcttgggcgttctcggagcaccacttcctgctatccacctccatgcgccagctgtcatgctcaacgtcctcggccaacacgtcgaagcagctgagcgttatgtcatagaaaatccaagcgcccatctccacatgtatggtaaactagaagcgaagcacaaccgcaaaatgggtcatgtgactttgtttagtgatgaaccagatagtgtggttgagttcgggaaaggaattgatttttaggtagctagaataatgaacaatgaggcagtttatggatttattattgattgataattcaaatatttttattgaagtaaaaaatattgtaggtcaagatggaagatttgattatgataaatttgtaaaaaattatacaaactttaaaaatcagaaaaagattttagttggttctactcctccgaagagtgatgggttttggtcaactatgaagagcaaaggttttgatgtatatacttatgagcgtaaactaaatggagaaaaagcagttgattcaaaaataattgctaaaggtgtatcgtttattgttcaacaagatcattctgcaacattgaatcttttaagcggagattttgacatgtttcctcttattgaagaagctttggagaagaattggatagttaatttatggtcttggaaagatagtttaagtaacgaatacttggatgctaaggaaattacaattaaatatcttgatgatgtagcagaagatttaatttattttaatcgtgatattgatggatattatgaaaaagaatatttaaaagaaagagaaattcgtcttgcaagagaaaaacaggtgatagaatttaatcaggctaagcagggcgctaaaaataaaatctctaggttacgttatatagataaaaatatctatttggagcgaattgacgaattagttaattttgaacaaatttctgacattgataggatcgtttctgctgctaaatcggaaaatttaaatctgaaaaacgaagcaatcgaaaaagaagctgaacagagacggcagaaagaagagcagaaaagacttgataaagaagctaaaaaacaagaaattaaagaatttataaaagaaaatcagggtaagattgtaactggagttgccgcatttgctggacttatttcctatgctattaaaaaaataaaaaaataatatgtctttatatataaatctatcaggagatacaaagcatatagaagaaaggttgctatgattcaactcatcgtcaacgatttgttgaaaaagataagactggagcagccatcgaagtcttgtatgctagtagcaatcacgaaaaagtgagagctaagtacgaagacttgattgcacaataccctgtaaactatttagtcatctatgatgtcccgttagatacggatttgaatacactagatcattacccatctgtgtggattggaaaagaggagtttgaataggagagactatatgacaaatacagaagatagtggagacaacaatccttattttggaacagtaaaggatatacccgcagaagcagatttattaggaataaagaagtataccgatggcttgagtaactttattatgaactgtgagactccaatgactatcgctattcagggggggtggggaactggaaaatcaagtattatgaagcaggttcaagaatctctaaaagaagattcggttgagattgtagaatttaatacatggcagtattctcagtttcatatggaagataagttagcgttgtctttgatttccgaattaatcaaagaacttcatggagaaccaaagttaatagaaaaactatttactgctgcaataataccaataataaaagaagtccctgctaaagctatttcaaaggctatttctaagactggagtaaatggtgaagttgttgtagataatgtcatagcggcctttactaagcaagtttctggtataaaggaatttaaagaagagttccaaaagctagtagataagaaaacatatacaaaaactacagatggtaaaaaaagaaataaacgagttgttgtttttattgatgatttggatcgtttatcgccagttaaagcagtagaattgttagaagtattaaaactatttttagattgcgaaggttgtgtttttgttctggctattgattcggaaatagttataaaagggatttatgacaaatatgatgaactcattcaggaggacaaaggaaaatcattttttgataagattattcaagttccatttgcagttcctactaaacaatatgatattagagcatttattaagaagtctttagaggaagatttaaaaacatttcaaaatattccagatccaaatttgaatgatattgttaatattatttctaactctttagggaataatcctagaggcataaaacggttatttaatcattatagcctgcttctctacatacaagaaacggaggatgattcagttagtaattggtctaatgaagagaaaatccaactattgtctgttttatgtctgcaattaagttttggaagaatctataataaacttcttgatttaattgagagtgcaagactcgaagattgtttattagaaataaataataaaaaaagagattttgaattatttgatgaaccattgaaagattcagaacaaaactatcttgaaattttctttaggatatttgaaaaagggggaaaaattgatttagaatcaatagaatcaaaattacaattatctacttctacatctatgactgttcaagaacgagattttacaaaagctgaggtctttctgcgcttttggcgagaattctctaaatatattagtgaacaaaaggaatttgagtatgagcatcccactggaaatgatgtgaaatcaaggtactacagagtgaaaaataaaacggaaaagtcacttcattgtgaatttcgtgtaaacaaaacttctgttggcttggtttatggagatacccaaaatcagtcttttaataagaaactgctagaaaagaaaaaacaaatagctgagaaatttggttctgaaaatgatgtgcatattagagaatggaataagaatagttacaatcatattcctggcgttcgtataatgaatagtaattttggttgggagaatgaagcagaatggagtgaaatatttagttggtttattactacgctaaattccttatcagaagtagtgaaaaaagataatttatatcaataataatgagtcgtatttaagtaaaaaggagaaaacatgatcgaacgttattcacgccctgaaatggcgaacatttggactgaagaaaataaataccgtgcttggcttgaggtggaaatcttggccgatgaagcatgggctgaattgggagaaattcctaaggaagatgtggctttgattcgtgaaaaagcggactttgacatcgaccgtattttggaaattgagcagcaaacacgtcacgatgtcgttgccttcacacgtgcggtttctgaaacgcttggtgaagagcgtaagtgggttcactatggtttgacttctactgacgtggtagatactgcctatggttacctctacaaacaagctaacgacatcatccgcaaagaccttgaaaacttcctcaacatcatcgctgacaaagcgaaagaacacaagttcactatcatgatgggtcgtacgcacggtgtgcacgctgagcctacaacttttggtcttaaattggcaacttggtacagcgaaatgaaacgtaacattgagcgtttcgagcatgcggctgctggtgtggaggctggtaagatttctggtgcggttggtaactttgccaacatcccaccattcgttgaaaaatacgtctgcgacaaacttggtatccgtgctcaagaaatctctacacaggtccttcctcgtgaccttcacgctgagtactttgcagttcttgctagcatcgcaacttctatcgagcgtatggcaactgaaatccgtggtcttcaaaaatctgaacaacgtgaagtggaagagttctttgccaaaggtcaaaaaggatcttcagcaatgcctcacaaacgtaacccaatcggttctgaaaatatgacaggtcttgcgcgtgttatccgtggtcacatggtaacagcttatgaaaacgtagccctttggcacgaacgtgatatctctcactcatcagctgagcgtatcatcgcaccagatacaactatcttgattgactacatgctcaaccgtttcggaaacatcgttaagaatttgacagtcttcccagaaaacatgatccgcaacatgaactctacatttggtcttatcttcagccaacgtgccatgcttactttgattgaaaaaggtatgacacgtgagcaagcttacgaccttgttcaacctaagactgcccaatcatgggataaccaagtagactttaaaccacttcttgaatcagatccagaggtaacatctcgtctcactcaagaagagatcgacgaaatcttcaacccagtttactacactaaacgtgttgatgaaatcttcgaacgcattggtttgggtgactaatctaaacaaaataacagaaagcaggtttgccctgctttttttgatggtgacatttatgtcactagttttgtttctttttcagccttataatagggtcatcgtaagaaaactatcagaaaggagaagttagcaatcttaaaaggacgacttaactatttaccggaacttagcctcttaatagtaagcattgcctataatatcatccgcatcatgaatgatcttggaagtatcaaagccccctcttggtttttagatatggatatccctagtgggtccttactattacttattttgcttattattttaaaaagtgaagcaagagaataaaactttaagcaagttttaagtttattagtttatattataaccatcctaataaaacaactagctttggtgagctagtagtaaaaaaaactttttcataactaatctccccgaagaaagtctagaaatctaggcttttttcttgttttttgagcttttattagggaattttaagaaaatacttgaaaacccttccaaaacaaggtaatatagttatataaagattctattggacaagcggtcaccttggaggattaggaagaagaggttgggaagcctgtacaatcgtatcttttcagtggtctttgaactgctgtgaaaatcccttaggggatttttttctgcgatttaaggtttctttaaggaaggcaagttatactctaagtctcctaaataacttttactgaacgtagttcagtgaatctcgttggcttacactttttgtagaacaacgaacttttctttttcataatctccaaaagagctcaacaccatgtgttgggttctttttttggcaattaaaaaaacgcccttaggcgttttaagtatagattacatctcgtctggagcttcaacaccgagaaggcgaagagcttctttgaggactgttgctgttgcgtagcaaagagccaaacggctgtcacgttctgggctttcgtccaagatacgtgtgtgtgcatagtatttgttaaaggcttgagctaagctgatagcaaatttagcaacgatagatggctcaaagttgtctgatgcacggttgatgatacgtgggaagtcttggatgagtttgatgatttcccagctttcaacgtcgtttaggctgtatgtagcatctgcagatggcgtgaagttagccttgcgcaagatagattggatacgagcgtgtgcatattgaacgtaaggtccagtttctccctcgaaggataccatggcatcaaggtcgaagtcgtaaccattcatacggtctgttttaagatcgtagaatttgatagctccgacacctacagcatgagcaacagcttccttgttaggcaagtttggattcttagcttcgatttgagcctgggcacggttaacagcttcggcaatagttggctcaagcaagataacgttccccttacgagttgacaatttcttaccgttcttagttacaagaccaaaggcaacgtgagtcatgtcgtcagaccagtcgtagcccatttctttaagaacagctttcaactgtttgaagtgagcagattgttcattaccaaccacatagatggctttggcaaagtcgtaagtacgtttacggtagagggcagcagccaagtcacgtgtgatgtaaagtgtcgcaccatctgattttttgatgagggctgggtgttcgataccgtatttttcaaggttaaccacttgggcaccttgagattcttggagaagtcctttttctgtcaagatgtcaacgacttcatccatcttatcattgtagaaggcttcaccgttgtagctatcaaaagaaacaccgagttcatcgtaaagacggttgaattccaccaagctttcgtcacggaaccattgccaaagggcagttgcttcctcgtcaccagcttccaatttgcggaaccattcacgagcttctttgtctacagatgggtcttcttcagcttcggcattgatacgcacataaagttgaaggagttcgttgatagggttagctttgacagcttcctcgctaccccatttcttataggcaacaatcagcataccaaactgtttaccccagtcacccaagtggttgatgcggactggtttgtagccttgtttagctacgatgttggcaagagcatcagcgataactgttgaacgcaagtgaccgatagagaaaggtttagcgatgttaggactagacatatcaaaggcgatgttacgtccgtgaccgatgttttggtcagcgtagtggctgccttgagcgatgacttgtccaagaacatccgctgagatttttgatttatcaaggaagaagttgatgtaaggaccaacagcttcaactttttcaaagtttgaggcatcgattttttcagcgatgtctgctgcaatcatttgaggagccttgcgcaagactttagccaatgagaaggcaggaaaggcgaggtcccccatgtcagcatttttaggggtttcaagcagattttgaatgttttcttgttccaattcgggaacaactttggcaatttctgctgcaatgagttctttagtattcataggtactccatttcaaatcttgtcattcatacctattttaccattattttagttaatagggtagggacaagaaagcatctattaggaagtattgcatgaaaaaatacaaaaattctgttataatatgcaaagaatatacataaaaagaggaaagataatgaagagagatcgtcaagctgttatcaaacagatgatttcaagagataagattgggacacaagaggaaattaagcaacgcctagaggcggaaggtatcacggttactcaggctaccttgtcacgtgacttgcgtgagattggcctcttgaagcttcgtgatgaagaaggtagactatactatagtttgtctgagcatgtgcttccaagtttggatcctacggttaaggactatgttaaatcagtttcccgtgctcagtttatgctggtcctccacacagagttgggtgaagctgatgttttggccaacctaattgatagtgatggtaaccctgaaattttaggaaccgttgctggcgcagataccctcttggtaatctgtaaggatgctgtggttgctgaaaaactggaaagcgagtttcactgatgaacactcctcatcaggatctccaaaaagccaaagaagagttaatcgacctcctcaaacaccatgaggcggttcttgcttttcaagaggctgagaaggccattggacaggtacctcaaatcagtcatctagctggacagatgaaggcttatcaacaagaagcagtgctttttcaaaaaattgagaaacaacgtgcctatgaggaggcaggtgagcaagcagatttgattcagcatgagctggaaaatttgcctattgttcaggactaccgtcaaaaaatgcaggatgccagtgacttgatccaatatgtgaccaagtctatcgaagaaaggattaacgaggagttaagacatggctaaggaaaaaatatctccaggaatgcagcagtatttggatatcaaggaaaattatccagatgcttttttgctctttcgtatgggtgatttttacgaattattttatgaggatgccgttaaggctgcccagattttggaaattagcctaaccagtcgtaataagaacgccgataatcccattcctatggctggtgttccttatcattcagctcaagcctatattgatgtcttagttgagatgggctacaaggtagctattgctgagcagatggaggatcctaaacaggctgttggtgtggttaagcgtgaggtggttcaggttatcacgccaggtacagtggttgacagctctaaacctgataatgccaataatttcttggtagccattgacaaggctggaagtcgattcggtctgtcctatatggatgtgtcaacgggtgaattttttgcgacagagttggacgatttcagttcagtttgtagtgaaattcagaaccttaaggcacgtgaagtagtggttggttatgatttacctgaagctgatgaacaagttttggtgaagcaactcaaccttctactttccaaggaaacagaggtttacgatgatgtccacttgattgacactagcttgacagacttggaaagtagtgtagcgggtaaacttctccagtatgtgcaccgtactcagatgcgtgagttaagccatttacaaaaggctcagcactatgagattaaggattacttgcagatgtcctatgcgaccaagtcgagtttggatttgctggaaaatgctagaacaggtaagaaacacggttctcttttctggctcctggatgaaaccaagacagctatgggaatgcgtctcttgcgtacttggattgaccgtcctttagtgaatcaggctgctatcatggagcgccagaatattatccaagttttcttggacaatttcttcgagcgtagtgacctgactgagagtcttaaaggggtttacgacattgagcgcttggctagtcgtgtttccttcggaaaggctaaccctaaagatttgattcagctaggtcataccctagctcaggttccagttattaaggcgattttggagtcttttgatgacgaggccttgtcacgtcttttacaagagctagatgctctgccagaattagaaagtctgattcggtcggctattgatcccgatgctccagcaaccattacagaaggtggcattatccgtgctggttttgatgagaccttggacaagtatcgcaaggtgatgagcgaggggacgtcatggattgcagacatcgaagccaaggaacgtgaagcgtctggtattacaacactaaaaattgattataaccgtaaagatggttattacttccatgtgaccaactctaatcttagcttggttcctgaccatttcttccgcaaggcaaccctgaaaaattcagagcggtttggaactgctgagttggctaaaattgaaggtgaaatgctcgaggcacgtgaaaagtcatcaacgctagagtatgatattttcatgcgtgttcgtgagcaggtggaacgctatattgatcgtttgcaatctttggctaaggctattgcgacagtcgatgtgcttcagagtttggctgttacagcagagactaatcattatgttcgtcctgtgtttaatgatgaacatcgtatcgttattgatcaaggtcgtcatgcggtggttgagaaggttatgggtgttcaggaatacattccaaacacgattacctttgacagtcagaccaatgttcagctcatcacaggaccaaatatgagtggtaaatctacctatatgcgtcagttggccttgtcagtcgttatggctcagatggggtcttacgtaccagcagatagtattgatttgccagtttttgacgccatctatacacgtattggtgctgcagatgacttgatttcaggtcagtcgaccttcatggttgagatgatggaggctaatcaggccattaagcgggcgacacctaattccttgattatttttgatgagttggggcgtgggacagccacctatgacggtatggctctggcccagtctatcattgagtttattcatgacaaggtgggggctaaaaccatgtttgctacccattatcatgagttgacagccctgtcaaatactttgacacaccttgtcaacgttcatgtggcgacacttgaaaaggacggagaggtgactttccttcacaagattgtcaatggcccagccgataaatcttatggtattcatgtagctaagattgcaggtttaccagcagatttactggaacgtgccgacaccatcttgacacaactagagggcgagacagtcaccatccaacctcaggaaaaggtatcgcctcaagagaagccagccactgaaacacatgtcaacgagcaaatctctctctttgatgattttactgaaaatccagttcttcaagagttacgtgatttggacatttacaatatgacaccgatgcaggtcatgatggctgtagcagatttgaaacagaaattataaaagaagcttgtcgattgacaggcttcttgtcttttataggtgtttcaattcttggttgagttgttcaatatcctttttcattttccaataagagaagacccaaacgaggagatagataaggctgaattcaatgactagctccaagtagaaagttaaacgtagagggaaccatccgctgagggtagctagtggaatgaaacctagacaggtcaaggcgtagtgagtgagggttgcacgaagtaaactccactcagctttacggaaaatataactagcgacttcaaagaggataccgatagcaaaccaagtgatgaggcagtaggctaataccatagatccgtgaacctgatgtgacgtcatccattgtccaatggctgagtgaggatttagaggcatgtagcttggtgcccagataagagacataatcatggatacgacaagtccgataaggatgccttttgtgcctgatttaaaaagttgctttttcattgtaatttctcctttattgctttgaggtaacggcgtgatgagtaggtggtttccttgtttttaaggtaaatttcaacgaggccgttaggggtaatgttgaagcgttcaatttctttgaggttgacaatctctgattgtgagattttgataaagtaagatggcagtttttctaaaacttgatagagacgtaagcctaagtggtactctccttgaatagtttcagctagaacttgacgattttcgatgtaaattctggaaatagcattaggctcgatgagataagtttcgccatctttttttcctttgagtcgttggttatcatccaaagattcgacaaactcgacaacttgctgaatcttgggcgttcgactaggtgcttgaatctgcaacatttcttcttgaaatatcgagtcaatatgaacttttattttcataactatcctttcttgtttgtaattgaggaggcctcctccctttcacacctttattaaacactatttactagtccacagcaatagcacttgtctatgtggtcctatatggtgtctaagtggttgaaaatattttagaaaacccctatacttaatgaaaacgtactgacgaggtaatcacatgaaatctataatgaaatggttagcaggaatttttcttgcctgcagtctgattttgagtttttttacaccttttgaaaaggcactaacactgaacctgctcttgctttatttctttgtaaagcagtttatggattctacaagctctcctagaacctatcaatgtatttttcaagttatttacctattgattttttctgggctcatttggttcaaccttcgtcatggggatatgattgttatagctacagccttatcttggctaacagttgtgtgtgagttgtggctttacagtaagcataagtaacagtcagcaccagtgaatttatcaaccttttagaagggagaaaaaataattatgccaaaaatcatcgaattgcctgaagttctagccaatcagattgctgctggtgaggtcgtagagcgcccagccagtgttgtcaaagagttggtggaaaatgctattgatgcaggcagcacccagattaccattgaagttgaagaatcaggcctctcaaaaattcaaatcacagacaatggtgaaggaatggctcaagctgatgtggccatgagtttgcgccgtcatgcaacaagtaaaatcaaaaatcaaggagatctctttcgtattcgaacccttggttttcgaggtgaggccctaccatcaatagcttctatcagccacctaactattgtgacagcagcggatggagaagcctatgggactaaactggttgctaaaggtggagaaattgagagtcaggaccctatttcaacaccagttggaacaaagattaccgttgaaaacctattttataataccccagctcgtctcaagtatatgaagagtttacaggctgagttggctcatattgtcgatgttgtcaatcgtctaagtctagctcatcccgaggttgcctttaccttgcttaatgatggtcgtcagttgacacagacatcaggtactggagacctccgtcaagctattgctggtatttatggtttgacaacggctaaaaaaatggtggagatttcaaattctgaccttgattttgaagtttctggatatgttagtctccctgagttgacccgtgcaaatcgtaactacatcacgattctcattaacggacgttatattaaaaacttcctgcttaaccgtgctatttttgatggatatggctctaaactcatggtaggacgcttccctattgcagttattgatattcagattgatccttacttggccgatgtcaatgttcacccaacaaagcaggaagtacgtatctctaaagaaaaagagctcatggcccttatcagctcagccattgctcaaagccttagagagcaggatttgattcctgatgcccttgaaaatctagccaagtctagtactagaggtgcagctaagccagttcaaaccagtcttccactcaaacaaaccaatctttactatgatagcagtcgtaatgatttctttgtcaaaccagagacagtccaagaagatatcaaacctcttatatcggagtcagagtctccagtttcattggtagaaaacaaaccgcaaccttctgttaaacaggcacagcgttcagcagatgaaggtgatagcgaacacgaaaaacttgattataaaaacaagtcgaaaatgaagcgcatgcttgaaactctggacaatgaggaaacatcaaccttccctgagttggagttttttggtcaaatgcatggaacctatctctttgctcaaggacaaggtggactttacatcattgaccagcatgctgcccaagaacgtgtcaagtatgagtactatcgcgaaaagatcggtgaggttgacagcagtctacaacagcttttggttccttatctctttgaattttcaggttcagattacattagtttacaagaaaaaatgtcccttctgaaccaggttggtatctatttagagccttatgggaataataccttcattcttcgtgaacatcctatctggatgaaggaagaagagattgaatcagcggtctatgaaatgtgtgacatgcttcttttgacgaatgaagtgtctgtcaagacctaccgtgctgagctagccatcatgatgagttgtaaacgttcaatcaaggccaatcatgcacttgatgattactctgcgcgtgacctcctagtacagcttgcacagtgtaaaaatccctacaattgccctcacggacgtccagtacttgtcaactttaccaagtctgatatggaaaaaatgttccgtcgaattcaagaaaatcataccagtctacgtgacctagggaagtattaaaactttttttgatcttgctttacgaataggaatgttagatttataatagtggtgaagatgagaaatcttctaatgttttagcatgtcattgtaggatgattgcctgatttttaagttaggaggtagagtgatgagacacctaacaaaaactaataaacactttgtatttgttggtttaacatttttagcgactagcttgattttctatattttggcctggttaggtcaaccaagtttggagaatactctagtaaatgtttctagcattgcctttactttaggcgttgtaacatatattctattaggcctgaagatgattacagatactttaaagacgagtagtcatccttaaaatagagcaaacagaatccactttcgagtggattttttgttacaatagtacagcagtgcttgagatgacaaaataaacactcaagacaattatcttacgagtataaaatgataaagcaaaccattgaagaaacgaacgagaaaggaaatcacacgctatgtatgattacatcaagggaactctagtgaaaattaccgccaagtatattgttatagaagcaaacggcttaggttatattgtcactgtagcgaatccatatagtttttctgaccaaatgaatcagactatccaagtctatcttcatcaggttattagagatgatgcccaccttctgtttggttttcatactgaagatgaaaaagaggtcttccttaagcttatttcagtttctggaataggtccgacgactgctctagccattgttgctgtagatgataatcaaggcttggttgctgccgttgataatagtgacatcaagtacttgatgaagtttccaaagattggtaaaaagacagctcagcaaatggttctggacttggcagggaaatttgcagagttaccaacagaaacgaccaagacaacaccaagtcaacctgaagggaatcatcagttggacgaggctatggaagccttgcttgctcttggttataaagctgcagaacttaagaaaatcaaagccttcttcgaaggtactaatgaaacggcagagcaatacattaaatcagctcttaagatgttgatgaaatgaggtaagcaatggtcaatcgttgtcgttgggttccaacaaacaataaattatattgtgattatcatgacaaggagtggggaaaacctattggtgatgaccaaaaactttttgagctgctatgcttagaaagttatcagtcagggctttcttggttaaccgttttaaataaaagacaggcctttaatcgtgtttttcatgactatgatattgagcgtgttgcccagtttagcctaagtgaacttgaagatgcgcttcaaaatccagacatcattaggcacaaacttaagctagaagcaaccgtaaataatgccaaacaagtactaaaactccaagatgaatttggctcactgtcccattatttttggcatttctttgacggaaagcccttgataaataatgtacccacatataaggatgtcccatcatcaactgacttatcccaacagattgccaaaaatttaaaaaagagagggttcaaatttttaggaccgactactatatattcatttttacaagccgcaggatttgtgaatgatcatgaaaacaactgtgacttcaaataaatgagtagatttgattgacaagacgagaaaaacatgttagtttataaacgaacatgtttttgagattattttacgaatagtaatataggtgaaccaatgaaagctgaattgattgcagtaggaactgaaatcctaaccgggcaaatcaccaataccaatgcccaatttttatctgagaaactagctgaactaggaattgacgtgtattttcacacagcagtaggagacaatgaaaatcgcctactttcagttcttgatcaggctagtcaacgtagtgatttagtcatactttgtggtggacttggccctactgaggacgacctaaccaagcaaacactggctaaatttttaggaaaagaactcgtttttgatgaggaggctagtaaaaaactggatagtttctttgctactcgtcctaaacacacacgaacgcctaataatgaacgtcaagcacaaattgttgagggagctattcccttgcaaaacccgacaggtcttgcagttggagggattattactgctcaaggggtgacctatgtagtcttacctggtccaccaagtgaactcaaacctatggtgaatcaagaacttattccagctcttactgagaatcactcaagtctttattcgagagtcctaagattcttcggcgttggggaaagtcaattagtgactattctgaaggattttattgttaaccaaacagatccaaccatagctccatatgctaaagtgggggaagtaacacttcgcttgtcaacgaaggcttcttcgcaagaagaagcagatcaaaaactagatgttttagaaaaacaaattcgttcgactaaaactctagatggcaaatccttatctgatttcatttatggatatggagagtctaatagtttagcctttgaagcttttcgtttgcttaagcactatggcaagaccatcactgcagctgaaagcctaacagcaggtttatttcaggctagtattgctgatttttcaggggcctcacaagtatttaaaggtggatttgttacttatagcattgaagaaaaagctaaaatgttggatattcccttgtcgcaactagaagaacatggtgttgtcagtcattttactgcagaaaaaatggctgaaggtgctcgagataaaacagatagcgattatggaattgcacttaccggtgtagctggaccagattcattagaaggacacccagcaggtacggtatttattggtattgctgataggaatcaagtaaggtcaatcaaggttgttataggtggaagaagtcgttctgatgttagatatattagtaccctctatgcctttaacctagttcgccaagctttattacaagaagacatgatttaagtttgtctttaactatagaaagaagaggaaaataagtggctaagaaaacaaagaaaacagaagaaattacaaagaaatttggagatgagcgtcgtaaagcacttgacgatgctttgaagaatattgaaaaagattttggtaagggtgcggttatgcgtcttggtgagcgtgcagagcagaaagttcaagttatgagttcaggctcgctggctttggatattgctcttggtgcaggtggttatcctaaaggtcgtattatcgaaatttacggaccagaatcatcaggtaaaacaactgtagccctccatgctgttgctcagacacaaaaagaaggcggaattgctgcctttatcgatgcagagcatgcccttgaccctgcttatgcggcagccctaggtgtaaatatcgatgaacttcttttgtcacaacctgattcaggtgaacaaggtctagaaattgctggtaagctgattgactcaggtgcagttgatttggttgttgttgactcagttgcagccttggtacctcgtgcagaaattgatggagatattggtgatagccatgtcggacttcaagcgcgtatgatgagtcaagccatgcgtaagctttctgcttctatcaataaaacaaaaacaattgctatcttcattaaccaattgcgtgaaaaagttggtattatgtttggtaatccagaaacaacccctggtggacgtgctctaaaattctatgcatcagtacgtcttgatgtacgtggaaatacgcaaatcaaagggactggtgataaaaaagaccaaaatgttggtaaggaaactaaaattaaggttgtcaaaaacaaggttgctccaccatttaaagaagcctttgttgaaattatgtatggtgaagggatttcacaaacaggtgagcttgtaaaaatcgctagtgacttaggtattattcaaaaagctggagcctggttctcatacaatggagagaagattggtcaaggatctgaaaatgcgaaaaaatatttggcagatcatccagatatttttgaagaaattgatcataaagtacgtgtacactatggtttgattgaaccagatgaagaggatattgttgaagaagcacaagttgaagaaacatctgatgaacttgttttagacctagattcaaccattgaaattgaagaataagtgtaaaagagccgacgagctcttttttctttgttttaatctaaataaaaagggtctatgatcattgaaaaagtccccaagattcaaaataggtcgctagaccgatttctaaaatcaaggacagtgataagataatagtatcatgtgacagaaagagagaattaacatgattaagatttatacaatctcaagttgtacaagttgtaaaaaagcaaagacatggttgaacaaccatcaacttccttataaagaacaaaaccttggtaaagaaccacttacaaaagaagaaatcttaaacatcctatcaaaaacagagaatggtgttgagagtattgtttcatcaaaaaatcgctatgctaaagctctaaattgtgatatcgacgagctcagtgtcagtgaggtgattgatttgattcaagaaaacccaagaatcttgaagagcccaatcttaattgatgataagagattgcaagtgggttataaggaagatgacatccgtgctttcttaccacgttcaataagaaatgtcgaaaattcgcaagcacgcatgcgcgcagctctataaaaaagtaaaaaaggagatacttgcgatcttctttttacgtttactctggcatagaaaataagtattgacattagttctcaaacttgatagactaataaagtcttaaggaaattgtccagtaacaaaaagtttgaaaaaactttaaaaaagttattgacaagacaggtcagagatgatattataaataagctgtttcgcgagagacagcagacacgagaagtaaaaaaacttcaaaaaagtgttgacaaggcattctagatttgctagaatatagaagttgtcttaagagagacaaagacctttgagaactgaataagaaaccaagtgcagggttatgatagaagaattataacctgtcaatttacaagaataaatcgtcagacgacggtaatgagttaacgctcgaacaattattaaaatttttaatgagagtttgatcctggctcaggacgaacgctggcggcgtgcctaatacatgcaagtagaacgctgaagagaggagcttgctcttcttggatgagttgcgaacgggtgagtaacgcgtaggtaacctgccttgtagcgggggataactattggaaacgatagctaataccgcataacaatggatgacacatgtcatttatttgaaaggggcaattgctccactacaagatggacctgcgttgtattagctagtaggtgaggtaacggctcacctaggcgacgatacatagccgacctgagagggtgatcggccacactgggactgagacacggcccagactcctacgggaggcagcagtagggaatcttcggcaatgggggcaaccctgaccgagcaacgccgcgtgagtgaagaaggttttcggatcgtaaagctctgttgtaagtcaagaacgagtgtgagagtggaaagttcacactgtgacggtagcttaccagaaagggacggctaactacgtgccagcagccgcggtaatacgtaggtcccgagcgttgtccggatttattgggcgtaaagcgagcgcaggcggtttgataagtctgaagttaaaggctgtggctcaaccatagttcgctttggaaactgtcaaacttgagtgcagaaggggagagtggaattccatgtgtagcggtgaaatgcgtagatatatggaggaacaccggtggcgaaagcggctctctggtctgtaactgacgctgaggctcgaaagcgtggggagcgaacaggattagataccctggtagtccacgccgtaaacgatgagtgctaggtgttggatcctttccgggattcagtgccgcagctaacgcattaagcactccgcctggggagtacgaccgcaaggttgaaactcaaaggaattgacgggggcccgcacaagcggtggagcatgtggtttaattcgaagcaacgcgaagaaccttaccaggtcttgacatcccgatgctatttctagagatagaaagttacttcggtacatcggtgacaggtggtgcatggttgtcgtcagctcgtgtcgtgagatgttgggttaagtcccgcaacgagcgcaacccctattgttagttgccatcattcagttgggcactctagcgagactgccggtaataaaccggaggaaggtggggatgacgtcaaatcatcatgccccttatgacctgggctacacacgtgctacaatggttggtacaacgagttgcgagtcggtgacggcaagctaatctcttaaagccaatctcagttcggattgtaggctgcaactcgcctacatgaagtcggaatcgctagtaatcgcggatcagcacgccgcggtgaatacgttcccgggccttgtacacaccgcccgtcacaccacgagagtttgtaacacccgaagtcggtgaggtaaccttttggagccagccgcctaaggtgggatagatgattggggtgaagtcgtaacaaggtagccgtatcggaaggtgcggctggatcacctcctttctaaggaaaaacggaatgtacttgagtttcttatttagttttgagaggtcttgtggggccttagctcagctgggagagcgcctgctttgcacgcaggaggtcagcggttcgatcccgctaggctccattgaatcgaaagattcaagtattgtccattgaaaattgaatatctatatcaaattccatatgtaattaaatacatatagatagtaacaagaaaataaaccgaaacgctgtgaatatttaatgagttaggtcgaaagaccaaaataaggttaagttaataagggcgcacggtggatgccttggcactagaagccgatgaaggacgtgactaacgacgaaatgctttggggagctgtaagtgagcaatgatccagagatgtccgaatgggggaacccggcaggtaatgcctgtcactcattactgttaaggtaatgtagaggaagacgcagtgaactgaaacatctaagtagctgcaggaagagaaagcaaaagcgattgccttagtagcggcgagcgaaacggcaagagggcaaaccgaagagtttactcttcggggttgtaggactgcaacgtggacttaaagattatagaagaactacctgggaaggtaggccaaagagagtaatagcctcgtattcgaaatagtctttatacctagcagtatcctgagtacggcgagacacgagaaatctcgtcggaatctgggaggaccatctcccaaccctaaatactctctagtgaccgatagtgaaccagtaccgtgagggaaaggtgaaaagcaccccgggaggggagtgaaatagaacctgaaaccgtgtgcctacaacaagttcgagcccgttaatgggtgagagcgtgccttttgtagaatgaaccggcgagttacgatatgatgcgaggttaagttgaagagacggagccgtagggaaaccgagtcttaatagggcgcattagtatcatgtcgtagacccgaaaccatgtgacctacccatgagcaggttgaaggtgaggtaaaactcactggaggaccgaaccagggcacgttgaaaagtgcttggatgacttgtgggtagcggagaaattccaaacgaacttggagatagctggttctctccgaaatagctttagggctagcgtcgatgttaagtctcttggaggtagagcactgtttgggtgaggggtccatcccggattaccaatctcagataaactccgaatgccaacgagatataatcggcagtcagactgcgagtgctaagatccgtagtcgaaagggaaacagcccagaccaccagctaaggtcccaaaatatatgttaagtggaaaaggatgtggggttgcacagacaactaggatgttagcttagaagcagctattcattcaaagagtgcgtaatagctcactagtcgagtgaccctgcgccgaaaatgtaccggggctaaaacatattaccgaagctgtggatacctttataggtatggtaggagagcgttctatgtgcgaagaaggtgtaccgtgaggagtgctggagcgcatagaagtgagaatgccggtatgagtagcgaaagacaggtgagaatcctgtccaccgtaagactaaggtttccaggggaaggctcgtccgccctgggttagtcgggacctaaggagagaccgaaaggtgtatccgatggacaacaggttgatattcctgtactagagtatatagtgatggagggacgcagtaggctaactaaaccagacgattggaagtgtctggccaagcagtgaggtgtgatatgagtcaaatgcttatatctataacattgagctgtgatggggagcgaagtttagtagcgaagttagtgatgtcacactgccgagaaaagcttctagcgttaattatactctacccgtaccgcaaaccgacacaggtagtcgaggcgagtagcctcaggtgagcgagagaactctcgttaaggaactcggcaaaatggccccgtaacttcgggagaaggggcgctgacttatggtcagccgcagtgaataggcccaagcaactgtttatcaaaaacacagctctctgctaaatcgtaagatgatgtatagggggtgacgcctgcccggtgctggaaggttaagaggagtgcttagcaatagcgaaggtatgaattgaagccccagtaaacggcggccgtaactataacggtcctaaggtagcgaaattccttgtcgggtaagttccgacccgcacgaaaggcgtaatgatttgggcactgtctcaacgagagactcggtgaaattttagtacctgtgaagatgcaggttacccgcgacaggacggaaagaccccatggagctttactgcagtttgatattgagtatctgtaccacatgtacaggataggtaggagcctatgacctcgggacgccagtttcgagtgaggcgttgttgggatactacccttgtgttatggctactctaacccagataggttatccctatcggagacagtgtctgacgggcagtttgactggggcggtcgcctcctaaaaggtaacggaggcgcccaaaggttccctcagaatggttggaaatcattcgcagagtgtaaaggtataagggagcttgactgcgagagctacaactcgagcagggacgaaagtcgggcttagtgatccggtggttccgcatggaagggccatcgctcaacggataaaagctaccctggggataacaggcttatctcccccaagagttcacatcgacggggaggtttggcacctcgatgtcggctcgtcgcatcctggggctgtagtcggtcccaagggttgggctgttcgcccattaaagcggcacgcgagctgggttcagaacgtcgtgagacagttcggtccctatccgtcgcgggcgtaggaaatttgagaggatctgctcctagtacgagaggaccagagtggacttaccgctggtgtaccagttgttctgccaagagcatcgctgggtagctatgtagggaagggataaacgctgaaagcatctaagtgtgaagcccacctcaagatgagatttcccatgattttatatcagtaagagccctgagagatgatcaggttgataggttagaagtggaagtgtggtgacacatgtagcggactaatactaatagctcgaggacttatccaaagaaagtaactgagacatattgacaacgatttggtttcttgatacagtatagatattcaattttgagttgagaatactcagagttaagtgacgatagcctaggagatacacctgttcccatgccgaacacagaagttaagccctagtacgcctgatgtagttgggggttgccccctgttagatatggtagtcgcttagcgcatagggagtttagctcagctgggagagcatctgccttacaagcagagggtcagcggttcgatcccgttaactcccattaagcgggtgtagtttagtggtaaaactacagccttccaagctgttgtcgcgagttcgattctcgtcacccgctttatttggaaacaaataaccaagcatttagcttgggcgcgtagctcagatggttagagcgcacgcctgataagcgtgaggtcggtggttcgattccactcgtgcccattatatggtccgttggtcaaggggttaagacaccgccttttcacggcggtaacacgggttcgaatcccgtacggactatgtttttatggaggattacccaagtccggctgaagggaacggtcttgaaaaccgtcaggcgtgtaaaagcgtgcgtgggttcgaatcccacatcctccttataattaacgcgggatggagcagctaggtagctcgtcgggctcataacccgaaggtcgtaggttcaaatcctgctcccgcaatatggctcggtagctcagttggtagagcaatggattgaagctccatgtgtcggcggttcgattccgtctcgcgccatttgtttatattttggaagggtagcgaagaggctaaacgcggcggactgtaaatccgctccttcgggttcgggggttcgaatccctccccttccatagttacgggcatagtttaaaggtagaactaaggtctccaaaaccttcagtgtgggttcaattcctactgcccgtgttagtaaagtggcgaatgtggtgaagtggttaacacatcagattgtggctctgacattcgggggttcgattcccctcattcgcctatatttttggggtatagccaagcggtaaggcaagggactttgactccctcatgcgttggttcgaatccagctaccccagttatactttgccggcgtggcggaattggcagacgcgctggactcaaaatccagtgtccgcaaggacgtgccggttcgaccccggccgccggtataagttacactccttaaggagtgtttttttgtctataggagtttattttttatgtctgataaatttcagcttctcttaaaacaaattcgttttcctgaggatcacgatgcttttaaagaaattaaagatggttctatcgaaacagtaaagttatttaaatcaaagcgccagtggttttttgttttttcttttcctagtgttttgtcttatgagtcttttgttctttttgatagtttacttcactcttgttttaattctttaggtgctaaagcttcttttgagattcgtttagtttctactgcttgcgatgattctttacttggagattacttttcatatgctttagatagtttaaaagtgtcacacttttctatttactctttattctcaaatctaaagcttgagatttcgaataatagtatttttgttaaggctccagagcatattataaaggaaaatttacaggatagatttatttttttgatatctaaatctctttctcaagttggtttatctgatgtatccatttctgttgtcgaagataaggaagcttcatcttctttagaagaggcttaccaaacaaataaggtttctttacaagaacaagctgagtctcaggctagacaggcgcttcaatctattattgaaagtgccccagcaccgaaacctgtgatcgaaccatcacaaaattttgctgagaaacaaagtcaacgtcaagctagttttgataaggctgaaataacgccaatggttgatattaattctgaagagaatcgtgttgtttttgaaggatatatttttgatgtagagcaacgtgaaacaaagacgggtcgaattattattaattttaaggtaactgattatacctctagttttgctatgcaacgatgggtcaaagatagtgatgagctcgctaagttcgatatgataaaaaaggggaactgggttagggttcgtggccgtatcgagaataatcctttcactcatagtctgactatgaatgtgcaagatattaaagagatttcccatactcctcgtaaggatttgatgcctgagggacaaaagcgtgtggaatttcatgcgcataccaacatgtcgactatggatgcaatgccaactgttgaagatcttattgatacagcggcttcttggggacatccagcagttgccattactgaccatgctaatgttcagagttttcctcatggctaccatagggctaagaaagctgggattaaggctatttttggtcttgaagccaatcttgttgaggataaagttcctattgtttataattcccagaatttggaattaaaagaagcaacttatgttgtatttgacgttgagacaacgggcttgtctgctgttcataatgatttgattcagattgcggcatcaaaaatgcataaaggtaatattattgagcaatttgatgaattcatagatccaggacatcctctttctgcatttactactgagttgaccggtattactgataatcatgttaagggtgctaaacctttagtgcaagttttacaggagtttcaagaattctgtcaaggaactgtgctagtggcccataatgcgacctttgacgttggttttatgaatgccaattacgaaagacatcagttaccaacaatttcacaaccggttattgatactttagaatttgcacgaaatctttatcctgagtataagcgtcatggtttggggcctttgacgaagcggtttggtgtggctttggatcatcaccatatggccaattatgatgcggaagctacgggtcgtttgttgtttatcttcataaaagatgtgtttgataagcacggtttgactaatctggaacagttgaacacggatttggtttctgaagattcgtataaaaagtctcgtgtcaaacatgcaacgctatatgttcagaatcaaactggcttgaagaatatctttaagttggtaagtttatcaaatgtctcatactttgagggagtagcacgtattcctcgtacggtcttagatgagtatcgtgagggaattattgtaggttctgcttgtgctgatggtgaggtttttgatacgctcttgtctcatggtattgacaaggcggttgaagttgccaaatattatgactttattgaagttatgccaccggcaatttatgcgcccttgattgcaaaggatttaatcaaggatgaggcggctatagaacaactgattcgggatttaattgaagtcgctaatcgcctggacaaacctgtgctggctacaggaaatgtacactatatcaaccctgaggatgccatttatcgtgaaatcattgttcgtgctttgggacaaggagccatgattaataggccaattggtaagggagaaaatgcgaaacctgctcctttacctgaagcgcattttaggacaactaacgagatgctagacgactttgcctttttaggaaaagacttagcctatgaaattgttgtaactaatacgcaggctatggcagatcaaattgatgaggttgaggttgtcaaaaaagacttgtacacccctttcattgatcgtgcggaagaacaggttgcggagatgacatatgctagagcgtttgagctctatggtaatcctttgcctgatattattgacctgcgaattgagaaagagttgtcttcaattcttggtaatgggtttgccgtaatctacctggcttcgcagatgctagttaaccgttcaaatgaacgtggctacctggttggttcgcgtggatctgtcggttctagttttgttgcgacgatgattggaattaccgaggttaatccgatgccaccacattatctctgtcctaattgtcaacactcagagttcattacagatggttcttatggatctggcttcgatttgcctgataaggaatgttcagaatgtggaacggaatataaaaaagatggtcaggatattccattcgagaccttcctaggttttgatggggataaggttcctgatatcgatttgaacttctccggtgatgatcaaccatcagcccacttggacgttcgtgatatttttggagagcaatatgcttttcgtgccggaacagtaggaactgttgcagatcggacggcttatggttttgttaaaggttacgaacgtgattacaataagttttaccgtgatgccgaggtcgatcgtttagccatgggggctgcgggtgttaagcgaaacacaggtcagcacccgggtggtattgttgttattccaaattatatggatgtctatgatttcacacctgttcaatatccggctgatgatgtaacggctgcctggcagacgactcactttaacttccacgatatcgatgagaacgtgttgaagcttgatattttgggacatgatgatccgactatgattcgtaagttgcaggatttatcaggaattgatccaaaagatattcgagcagatgatccagatgtaatgaaacttttttcagggactgatattttaggggtaacacctgaacagattgggacaccaacgggaatgttgggaatccctgagtttgggactaactttgttcgtggtatggtcgacgagacgcatccgacgacctttgcggaactcttacagttatctggattgtcccacggaacagacgtttggttaggtaatgcacaagatttgattaaggaaggtatcgccactctgaaaacagttatcggttgtcgtgatgatatcatggtatacctaatgcatgcgggattagatcctaagatggccttcacgatcatggaacgtgtgcgtaaggggatgtggttgaagatttccgaagaagagcgtaatggctatattcaagccatgcgtgaaaataatgttccagactggtacattgaatcttgtggtaaaatcaagtacatgttccctaaagcccatgcggcagcctacgttatgatggccctacgtgtagcttatttcaaagtgcaccatcctatttattactattgtgcctacttctcgattcgagctaaagcatttgagcttaagacgatgtctgcaggtcttgatgctgttaaagctcgaatggaagatattaaggagaagcgccaacgaaatgaagcgactaatgttgaaaatgacttatttacgacgcttgaaattgtcaatgaaatgttagaacgtggctttacctttggtcagttagatctttataagagtcaggcaactgaatttctgattgaaggagatactttgattccaccgtttattgcacttgaaggtttgggtgagaacgttgctaagcaagtggttgctgcgcgtgaagaaggtgaattcctttccaagacagaattgcgtaaacgaggaggcctatcatcaaccttggttgaaaaattggatgaaatgggaatcctaggaaatatgccagaagataatcaattaagtctttttgatgatttcttttaatagctaaagagaatcgtcatcaactttgagagaatggagtcagtctccgttctctttttgtttaggggtctgcatgtgatgctaacaagccaaagctgagaagaaacctttttcttcgtcttatggtatactgatagaaaaatatagtttcaaggagttaatcatggttttaccaaattttaaagaaaatcttgagaaatatgctaaattactggttgctaatgggattaatgtgcaacctggtcacacagtggccttgagcattgatgtagaacaagcagagctagctcacctcttagtaaaagaagcctatgctttaggagcagctgaggtaatcgttcaatggtcagatgatattattaatcgcgagcgcttcttgcatgctgatatggaccgcatcgaagaggttcctgcctataaaaaagctgagatggaatatttgttgaccaaaaaggcaagtcgcttaggtgttcgttcatcagatccaggtgcccttaatggtgtagctcctgaacgtttatctgcccatgctaaagctactggagtggcctttaaacctatgcaggtggcaactcagtctaataaggttagttggactgtagctgctgcagctggtaaggaatgggctaagaaggtctttcccgatgcttcgagtgatgaggaagctgtagatttactttgggaccaaattttcaagacctgtcgtgtttatgaagaggatcctgtacgtgcttggaaggaacatgctgaccgtttggatgctaaagcacgcctactcaatgaggcacaattctcagccttgcattaccaagcacctggaacagatttgactctaggattgcctaaaaatcacgtttgggagtctgcaggtgccatcaatgcgcaaggtgaaggcttcctccctaatatgccaacagaagaagtctttacggcaccagattttcgtcgtgcagatggctatgtctcaagtacaaagcctctaagttacaatggcaatattattgagggaatcaaggtaaccttcaaagacggtgaaattgtagatatcacagcggaccagggcgatgaggtgatgaagaatctcgtcttcaacaataatggggcgcgtgctctaggtgaatgtgctctggtaccagatccaagtcctatttcacagtcaggcatcaccttctttaacactctttttgatgagaatgcatccaaccacctagctattggagcagcctatgctaccagtgttgagggaggggcagacatgacagaagaggagcttaaggaagctggtcttaatcgttctgatgtacacgtagattttatgattggttcaaatcaaatggatattgatggtatccgccaagatggtagtcgtgtaccaatcttccgaaatggggattgggtaatctaagtatgatggagaatttatcatgattggaagtatgatagttggttttctaattggccttattgcctctgctatatcaaataggggtgaacgtatgggctgtattggcaagacctttgttggatggctaggtgcttttgttggtcagcttctttttggaaattggggacctatgctagcagatactgctatagttccttcggtactgggtgctgttatcttattagcccttttttggaatcgtaatagttagaaatgaaagagttctgaggtattggttagatatctaaggactcttttttcttattttttcattttcatataccacttttagaaaaactgtggtagagtaataaaaacagcatctatttggaaaggactagaaatgagtgacttagataaaaacatggctgtaaaaagtatggtagttatgcgtaaggcttttcgtaccatcgatgccaaggtttctgagacctttaaagaatttaatttgacaccaactcaatttggggtcatggacgtgcttaatgctagaggacgtatgaagattggcgaattaattgaccgcatgcttgccacctccgggaatatgactgtcgtcattaaaaatatggagaaaaaaggttggttgacgcgagaagcctgccaaacagataagcgtgctttcgaggttgatttgacgggtgagggacgtcgtattattcaagcagcaatccccccacatcagcgagctattgaggagactttttccgttctgacacttgaagagcaggcacagttggtagagctactgaaaaaatttaagaatgtctgagcatatttctttatatttctaatgaaattacatatattactatgtagtattaattattaattgttagaaatacaaaggaaatgtatcatgaaaaacattctatttatcgttgggtcccttcgtaagggatcatttaaccaccaattagcaaaagaagctgagaaaatgctagctgataaagctaatgtttcttatcttgactatagtcaagtacctgtttttaatcaggatttagaaagtccggttcttcctgttttggcagaagttcgagagcaggtcttggcagcagatgcaatctggattttctcaccggtttataatttttcaattcctgggccagtgaaaaatttgcttgactggttgagccgcgcccttgacctatcagatccttcaggaccatcagctcttcaagataagattgtaaccgtgtcatcagttgctaatggtggtcacaatcaactttttgatgtctacaaagaattgttaccatttatccgtacccaagtggttggtgattttacagcgacatgtgtaaatgatacagcatgggtggatggaaaattcgtagcaacagcagaagttcttgaaagccttcagactcaagcagaggctttggttgaagcgattaaataagaataacgaatacccgaggtatctagcttcgggtatttttatatgcaataatgaaaaaagacaccctaaggtgtcctcgtattatgaaggcggtagacggatttgaaccgacgatcaagcttttgcagagccgtgccttaccacttggctataccgccataacagataccattctatcgaaaaaacaaagattcgtcaagtctctttcatcaaattggctggttgattgttcaaactacctatttacgagaaatataaagaggctgaaagacattcaacctctttatgtttcttgtaattgttgtagatagattactaacacgtatgttttgattattgtctaatcaagtaatcaaaggctccgatagcagctgtagcaccagatcccatggaaataatgatttgtttgtaggcgctgtcagtacagtcacctgcggcaaaaataccagggatatttgttgaaccaaatttatcaacgataatttcttggcgttcattgagttcaataccactgtctttgagccaagcagtacttggtacaagaccaatttggacaaagacaccttcaagatcaagatgtttttcttcgtttgtatcacactcaacgtaactcaaaccagtcacatgatcttgaccaagaatttctttggttgcaacgttcttaagaatggttagattatcagttttagcagctcgttcttgtaagacttgatctgcctttaattcaggcaagaactctaagactgtaacgtgtttagtaatacccgctaaatccaaagcagcttccaaacctgagttaccaccaccgataacagcaacatcttttccttcaaatagaggaccatcgcagtgtggacagtaagtaacccctttattgcggaattcttcctcgccaggaacgttgatattacgccatttggctcctagtgctaggatagcagttttagcctgtagaacggcaccgttagctagtgtgacttcaataagttctttcttctcaatgccagtagctaattgacttttgatgatatcaacattgtaagattttgtatgctcttcaacttgggccattaacttaggaccttctgtatatagcgtaccaatcatgttctcaataccaactgtctcgataacttgtccaccaaaggtttctgctaaaagcccagttttaagccctttacgagcagcgtaaattgcagcactgtttccagcaggaccaccaccaataaccaagacatcatagacccctttatcagcgaaagcctcagcatcaagtgggccgtccaatttttctacaagctgttcaatggttgcacgaccagaagtaaattcttcttggtctttgtaaaccgtaggaacagacatgatacctttggctttgacctcatcttgatacataccaccttcaatcatggtgtgggtgatgttggggtttaaaacagccattatattaaaggcttgaacaacgtctggacaattgtgacaggttagtgaaacataagtttctaaatcgatggttttatcaatcttcttgatacgttcgataatatcctcatcaactttaggtggacgaccagaaacttgcaagagagctaaaatgaaagatgtgaattcgtggcccattggtaagcctgagaaaataacacgacttttttgccctttttgtgcaataccaaaactaggttgacgttttaaatgtgttgattcaagactaatgcggtcagacatagcaacaatctcgtctagaaattcttttactttacgagaattatcatcatcccctaaatctgtttgtaatacaatatcagattctagtaaatttaaatactgcgctaattgtgtcttgatttctttatctaagaccatggataccccctggttgttaaattttacctacaagatctaagctaggagtaagtgtttcagctccttctttccatttagctggacaaacttcacctggatgttgacgaatatattgagcagcacggactttatcaacaagagtacttgcatcgcgtccaataccatcagcgttaatttccatcatttggataacaccatctggatcaataatgaatgtaccacgttgtgcgagaccatcttgtccaagaacatcaaaaccttgtgagatgtggtgtgaaggatccccaatcataggataagtaatagttccaacaacatctgagtcatcatgccaagctttgtgaacaaagtgagtatcggtagagacagagtaaacctctacaccaagagatttaagagcttcatattgttcttgaaggtcaccgagttcagttgggcagacaaatgaaaaatctgcaggatagaagcagaagaccgcccatttacctttaacatcttcatctgtaacagtaatgaattccccgttgtgataagcctgtgctgaaaattcaataatttcttttccgactaatgacaaaataatgtcctcctctatttttgatagcctaattataaacaaaatactcatcaacctcaaagaaaacgattgcaattttaatgagaggggatttttctaatggtcagactggttttagagcttgtcaaatgtcactttttttgataaactattatagttgcgtaaagtgacaaatactcattctaagccgattgtggtcttgttgccgcagggtgggactgcaagtctaaagcttagaagaggaaaaaacaatttttaaggagaaatactcatggcagtaatttcaatgaaacaacttcttgaggctggtgttcacttcggtcaccaaactcgtcgctggaatcctaagatggctaagtacatcttcacagaacgtaacggaatccacgttatcgacttgcaacaaactgtaaaaatggctgatacagcttacgaattcgttcgtgaagcagcagctaacgatgcagtaatcttgttcgttggtactaaaaaacaagcagctgaagcagtagctgaagaagcaactcgtgctggtcaatactacatcaaccaccgttggttgggtggtactcttacaaactgggatactatccaaaaacgtatcgctcgtttgaaagaaatcaaacaaatggaagctgatggaactttcgaagttcttcctaagaaagaagttgcacttcttaacaaacaacgtgcacgtcttgaaaaattcttgggtggtatcgaagatatgcctcgcattccagatgtaatctacatcgttgacccacacaaagaacaaatcgctgttaaagaagctaaaaaacttggtatcccagttgtagcgatggttgatacaaacgctgatccagatgagatcgatgtaatcatcccagctaacgatgacgctatccgtgccgttaaattgatcacttcaaaaatggctgatgctatcatcgaaggtaaccaaggtgaagatgcttctgcagatttccaagaagcagctgcagctgattcaatcgaagaaatcgttgaagttgtcgaaggtgacaacaactaatctttaagattggttagggctatatgcccacttaagatacgacaaacacctaaggggcggggctcagccctgccccttagtttgataaaataaatttggagaaaaacaaaatggcagaaattacagctaaacttgttaaagaattgcgtgaaaaatctggtgctggtgtcatggacgctaaaaaagcattggttgaagttgaaggtgatatcgaaaaagcgattgaattgcttcgcgaaaaaggtatggctaaagcagctaagaaagctgaccgtgttgcagctgaaggtttgactggtgtttacgttaacggtaacgttgcagcagttgttgaagttaacgctgaaactgacttcgttgcgaaaaacgctcaattcgttgagttggtaaacgaaacagctaaagtaattgctgaaggtaaaccagctaacaacgaagaagcacttgcattgactatgccttcaggtgaaactcttgaagctgcatacgtaactgctacagctactatcggtgaaaagatttcattccgtcgttttgcagttgttgagaaaactgatgcacaacacttcggagcttaccaacataacggtggacgtatcggtgttgtttcagttatcgaaggtggagatgatgctcttgcaaaacaaatctcaatgcacatcgcagcgatgaaaccaactgttctttcatacactgaattggatgaacaatttgttaaagatgaattggcacaacttaaccacgctatcgatcaagataacgaaagccgtgcaatggttaacaaaccagctcttccacaccttaaatatggttctaaagctcaattgactgatgctgttcttgctcaagctgaagaagatatcaaagctgagttggctgctgaaggtaaaccagaaaaaatctgggataaaatcatcccaggtaaaatggaccgcttcttgcttgacaacactaaagttgaccaagcttacactcttcttgctcaagtttacatcatggacgacagcaaaacagttgaagcttaccttgaatcagtaaacgcttcagtagtagaattcgttcgctttgaagttggtgaaggtatcgaaaaagcatctaacgactttgaatcagaagttgcagctacaatggcagcagcacttaacaactaattctagttgctagataaaaagaaagaagttacgtaaatgaatcgtaacttcttttttgttgttataaaaaaaacatctgagcatgccccagacgttaacaaagtaattaatgagcgaaggtatttacaccaagtagaagagagagtgttcccatgatgatacctgcaaggataacccccagcataacggcaataacactacgtttaaagtcccaatctaggatagatgctgctagggtaccagtccaggctcctgttcctggaagtggaattcccacaaaaaggaggagggcccagaagacccccttatctccggcagctttttcaagtttttgcccaccactgtgaccttttttaagacaccaggtaaagaagccaccaattagaggtttgtctgccccccattcgagaacacggcgggcgaagaagaagataattggaactggaatcatgttcccaataacacaaagaataagggcttgccaccaagggatacctgaggcgatagcaacaggaacggctccacggagctcaaccaagggaatcatagagattaagaatgcaatgatgtatttcatgagtaacctttcatagagaaataaaataaagactaaaagtcacaagagctttatcaagagtgataagactaatactactgcgaaagtgctaaaaagtacttgttggattaggtgaggctcagcctgtcaaagtggatcaaacacttaaagttacctaatattttagtcttatttattgtatcttatatggtctctaatgacaactttaaaaagctttttgaaggtatagtttcccatgtgctgacatttttggtataataatagtcagttatagtcaaattagactggaggaattaagatggcaagaaatacatcagatagtatagaagaatatattaaagaattgctgggccagtctggaattgctgagattcaacgctcgaacttagcagatacttttcaagttgtaccgagtcagattaattatgttattaagacccgctttacagaaagtcgtggttatattgttgagagtaagcgtggaggtggcggttatattcgtatcgtcaaagtcagattctctgataagcaccacatgattaatgatttgcttcagaacttagcggatcagctcagcgagcaggtatttacagacttgatccagttgctttttgatgaaaaaatcatcacagaacgtgagggaaatttgattttagcaactgctagtgatgatattttaggcgcagatgcggctgctattcgttcgcgtattctacgctcgctattacttagattggatagaaaaggaaattagatgacgacatattcaagaaaaatgcaggccattttccatcgtgcacagcttgaggcagagcgttttggaagtccttttctggagacttggcatgtgcttctggctatggttgaggttccaggatctgtagcctacctaacatttactgattttgaggaccgtattcgtgcggaagagattgagacagccgctgtactagcgatggagaaaagtccaaaagacttgtctgaatcagatattatcgatttacgtgtacagtcacatgctttagaggctatgttgcaagaggcagagggaattgctggtgtgactggtgctgtagaggtagggtctgaacatgtattgatggcctttctccttcataaggatttgatggtttgtcgtctccttgaagttgctggttttcaatataaggatgacagtgataagcctcgcattatcgatttacgacgttctttggagcgttacgcaggtcttagtaagcaagacttgaaggccattcatgaccttcgtaagcctaaaaaatcaaaggcatcaggaaattttgctaatatgatgcagcctccccaatcttctactggggaactgtcagattataccaaggacttaacggctgtagccgagtcaggtgctcttgatcctgttattggacgtgagaaagaaatttcacgcatgattcaggttttgagtcgtaaaacgaagaataacccagttcttgttggtgaagcaggtgttggtaagacggcactggcgcttggcttggcacagcgtattgcttcaggcgaagtaccttttgagctggctgatatgcgtatcttagagcttgatatgatgagtgtggttgcaggaacacgtttccgtggtgatttcgaagaacgtatgaatcaaatcatcgatgagattgaagctgatggaaaaatcattctctttattgacgaactgcatacgattattggttctggttcaggtattgatagtaccttagatgcggcaaatattttgaaacctgctctagctcgtggaacccttcatatggttggagctaccactcaagcagagtatcaaaagcatattgagaaagatgcagctctttctcgtcgttttgctaagattacaattgaggagccaagtgtagctgaggcgattgatattctaaaaggcctacgttcgtcttatgaagactatcatcgtgtaacgattactgatgaagcggttgagacagcggtcaaggcggcgcatcgttatttgacgagtaaaaacttacctgactctgccattgaccttttagatgaagcgagtgcgactgttcaaggtcgtattaaaaaagaagccaaacgtgagataacgcctttggatgaagcgcttctatctggtgatatgaaggctgctgttaaacaatataaggctagccaaaaagcaaaattaccaaaacctgccttggtagatgcggatcagattatgcaaacccttagtcgtctatcaggtatccctgttgagaagatgactcaggcagatagcaagcgttacttaaatctggaagcagagcttcacaaacgtgttattggtcaagacgaggcagtttcagcgattagtcgtgctattcgtcgtaaccagtcaggtattcgtactggaaaacgtcctattggttccttcatgttccttggacctactggtgttggtaagacagaattggccaaggcattggcggaagttctctttgatgatgagtcatctttgcttcgctttgacatgtcagaatacatggaaaaatttgcggctagccgacttaacggtgctcctccaggttatgttggatatgatgagggcggtgagttgacagaaaaagttcgtaataagccttactcagttcttctctttgacgaggtggaaaaggctcacccagatattttcaatattctcttacaggttttggatgacggtgtcttgacagatagtcgaggtcgtaaagttgacttctcaaataccattatcattatgacttcgaacttgggagcgactgctcttcgtgatgataagaccgttggttttggagtccaagacatttctcataatcaccaagctatgcagtcacgtatcatggaagagcttaagaaggcctaccgaccagagtttatcaaccgtattgatgaaaaggttgtcttccatagtttagaggaagagcagcttcgtgagattgtcaagattatggtaaaaccgttggtatcagctttggctgaaaaagggattgacttgaaattccaaccagctgccctcaaacatttagctaaagatggctatgatgttgagatgggtgctcgtccattacgtcgcacgattcaaactcaggtggaggataagttatctgagctcttactaggtggccaagtagttagtggacaaacccttaagattggatgctcgaaagataaattaacctttacagtagtgtaaaaatcaaacaaaaagacagattacaggtgtagtttgtctttttgttgtgtcaataggagtcaagatagagtcaatctttctgtaaagttggggtaaaagaaaaagccgagcaaagctcgactgtaatgattagagtttttcattgacaaagttgacaaagtgattccaccagaccttgaggaagaagcttttcttaacttctttaccagcaaccagttccatgctaggcataccttggttaggcaagtaaccttctcctacaagtgatttatcttcaaaggtagccgttccaaccttgtcacttgagttgacaggggcttgaacttgattggtagtgactttaatatgtttactattgttagcatctattctttggatgatattaaagtcagacttagcaacagcagtgacttgcttagatttaccatcaataacatgggcttgacttttaccgatggcttgtccttttttggcaatggtcttgctttcccaatgatagacaacgtagttaagtaggtcatttgttgcagtgaaacgggcgtagtcatcagtatcggtattatcagcattcaaaatgactgtgataatgctcatgccactttcatttgagtgggccacgaaggaagcaccagctaaatcagtggttcccgtttttaggccatccacccctttacggtaactaggttgtcccttcagcatatagttgaaggttttaagtttgttgacaccatcaaaatcagcctcagtttttttagtgatgtcgagaatttcaggatattctttcaccacgtgttgtgcaatgatagcaacatctttagcactcatggtattttcttcgtctgatttagagcctggatagatattgtcacctaagtaagaattattgagaccagaggcattgacaatcttggcatcagtgataccccaatctttaagttgggctttcatcatgtcgacaaacttactttcggttcctccgatttcctcggctagagcaatagatgcactgttggcactggaaataagagttgcgtcaagaagttgtttgacagtgtatttgcgggcatctagtggaatattagatactcctgcactgacagttagttcaaaggggtagtcagaaatgtcaactttgctgttccatttgaggtctccctgatctaccgctttataaaccatataggctgttaggagcttggtaatagagccaatccctgtagaggtggttgcatctttttcatataaaattttgccagtattagcttcgacagcgatggcatgtttggctgcggcatcatatccttttttcttatctgctgcaaaagcaggggctacgcttcccagacagagtaagaaggtcatcataagcgtaatcagttttttcatggtttgttccttcatgtgttttggatatttattataccacattttgagaggaacttaaggtgttgagaaggggcttttacttacaagactaatttttatggcaagataaaactaccttttgatagctaaaaggtagttttgtgtttacttgtttcctgtaaagaaattaacgatatggttccaccaaacttttaagaagaaacttttcttgatagattggttggctgttacagaaatttgaggtggatcagagatgtaacctgttccaacgagatccttatcatcaaaggttgctgttccaatagtgtcaccttttttaataggtgctgttatagtttttgctttgattttaacagcatcattttggctgtttattttttgaacgactgtaaggtccgactcgagtttagcagagatggtttgactgtctccatcggctaccttaatatcatttttcttgacgatttgtcccttggtgttaagggttttgatttcccagttttgagtcacataatctagcaactcatttgtggctgtgaatctggcagcttcatcttctccaccattatctgcattcatgacaacggtaatcaaactcatgccattttcattggagtgggctacaaaggatgctcctgcaagttcagttgttccagtcttgagtccatcaacgccttcacggtagttgtcttgcccctccaacatgtagttgtgcgtcgttaatttgttgtcaccttcaaaatcagtttcggtttgcttggtgatttcaagtacctgaggatagtctttaatgaggtggtttgcaataatggcaacatctagagcgctcatagtattttcgtcatctgctttagagccaggatagcggttatccccaaggtatttattgtttaggccagaagcgttaaataatttagcatctgtaatgccccactctttaagttgggctgtcatagtgtcaacaaatgcactctctgatcctgagattttttcagctagagcaatagcagcactgttagcgctagaaatgagggtggcatctaggagctgtttaacagtgtattttcgggaatccaatgggacatttgaaacttctgaatcaactgttaggttgaaaggatagtctgagatatcgacttcagtgtcccaggtaatttttccttggtcaactgctttatagaccatgtaggctgttaggattttagtcattgaagccacaccatcaggagtagtggcgtccttttcatagaggactttccctgtagttgcttcgatagcaatcgcatgtttagcggaaacattgaagttatctgtctgttcttgtgctagagcaggtgttactaggcctagtaagattaaggcaatcataatgatgtgttgtaattttttcatagtcattcctttgtctctcataagtgtttattatatcacaaaacgacttaaatatctgagagaaagggagacttgggtgctaacttatgccggagctctgccatttttgactatattatggtaaaatgaaagttatatcaaatgaatgacataaagttgaccggttcgtttttgtaagggctggtcatggataaaaagagggatcaaacatggctaaacaaacttttgagatgacctttgcaggacgcccgcttgtcgttgaagttgggcaggtagctaagcaggctaatggtgctgtcgtcgtgcgttatggagatacaacggtattatcaacagctgttatgtctaaaaagatggcaacggcagatttctttcctttacaggttaattacgaggagaaaatgtatgcagctggcaagttcccggggggctttaacaagcgtgagggtcggccttcaacagacgccactttgactgctcgtctcattgatcgtcctattcgtcctatgtttgcggagggctttcgtaacgaagttcaggtcattaacacggttctctcttatgatgagaatgctagtgctccgatggcggctatgtttgggagttctttagctctttctatctctgatattcctttcaatggtccaattgctggggttcaagtagcctatgctgcagaagatgtcatcatcaatccaagtgcagcggataaggaagtttcacttttagatttgacagtggcaggtaccaaggaagctatcaatatggtagagtcaggtgcccaggaattgtctgaggatattatgttgcaagcactcttgaagggacatgaggcaattcaagagttggttgatttccaaaattatatcgttgcagctgttggtaaggaaaaggctgaggttgaacttctacaagttgatgctgatttgaaagtcgaaatcgaaacggcttattatgatcagttagctaaggctgttcaggtggaagaaaaactggcgcgtgaagcagcaacccaggctgtaaaagaagaggtcctcgcttcttatcaagaacgctttgcagaagatgaagataaggaaaccattctgcgtgatgtagcagaaatcctcgagcagatggaacatgctgaagtgcgtcgtctgattacagaagacaaggttcgtccagatggccgtcgtgtggatgaaatccgtcctttggacgcagagattgactttcttcctaaggttcatggttcaggtctctttacacgtggtcaaactcaagccttgtcagttttgactttggcacctatgagtgatacacagcttgttgatggtttggatccagagtataagaaacgtttccttcaccactataatttccctcagtattcagtgggtgagacagggcgttacggtgcaccaggtcgacgtgagattggtcacggagccttgggtgaacgtgcccttgctcaggttctcccaagtgtcgaagagttcccttatgctatccgtttggtagcagaagtcttggagtcaaatggttcttcctcacaagcttctatttgtgcaggaaccttggctcttatggctggtggtgtaccgattaaggcacctgttgcaggtattgccatgggacttatctcagatggtactaactacactgtcctaactgatattcaaggtttggaagatcattttggagatatggactttaaggtagctggtacacgtcaaggaattacagctcttcagatggatattaagatttcgggtattacaccggccattctcgaagaggctttggctcaagcaaaggtagctcgttttgaaattcttgatgttattgagtcagcaatcgctgagccacgtccagaattggcaccaacagcacctaagattgatagcattcagattcctgttgacaagatcaaggttgtcatcggtaaaggtggcgaaactattgacaagattatcgctgagactggtgtcacaattgatattgatgaagaaggtcttgttcagattttctctagtgatcaggatgccattaaccgtgctaaaaccatcatctctaatcttgtacgtgaagctaaggttggtgaagtttacactgtacccgttgtgcgtattgaaaagttcggtgcctttgtccaccttttcaataagacagatgctctcatccatatctcagaactagcttgggaacgtactgagcatgtcgaagatgtggttaaagttgggggtacggtaactgttaagattatcaaaatcgatgaaaaaggacgtatcgatgcctcaatcaaggccttgcttcctaagcctgaaaaacttgaggatggggaaaatggaggagagcatcgtcaccgccgtcgttctcatcataaaccacgccaccataatgaaagtggtgaagcaccgaaaaatcctgataaatcagaaacgaaagaacaggcagaagaatgacagaaaatcaagaattgcaagcttttgatgaaactctaaaagaatttttaaaggaaccagaccactttttgactagtctggctttggttaatcatctacaacgtactcccgttttggctgcccaagacctctacgcagttgaagtggaaggaaagaaggttgttcctgtcttcaccaacgaacaggacctacaatctttcaaatctactcaagagagtgctcgagagcaaacttgggtagaacgttcgagcttagatgttttaacacaactggttcaggcagagctttttggtcttgctttcaatttaaaagaggatggtgacttctcgaataccactctttttgcaagcagtgaactcatccagtttatcaactatttcactcagacccttaataatcttttgggtgaggaaaatcaaaaggcagatcctaaagataagatttatcttgttccagccttcattcataaacgtgaggaagatggccaggatgaccgtctctttgcgaccatgtcgaatgcagagggacagagttatgtgcctgtgtttacgaacttaacgagctttgcaaaatggtacgggaacgagacttttggcctacctttccgtaaggctaaagggacgattttgcaatggccactgtcagaaatttatcagccttcaacaggtgaaaatgagttggataaggttcaaggtattgtcatcaatccgtttgatgagcagcctgagttagtcgactggtcttattttgaaggggatagcgagtagacctagtgttggtagctttccactttaaagaataataggccacagcaaacaataataacaataatgatgtaaggagtgacctaaatgggttggtggaaagaaagtattgatatagtaaagaaaaatgacccggcagctcggacgagtctagaggttcttttaacctaccctggattaaaagccttggctgcccatcgtatctcacattttctctggcgccaccattgtcgactcttagcgcgtatgcatagtcagttttggcgcttttggactcagattgagattcacccaggggctcagattgctgaaggtgtctttattgaccatggctctggccttgtcattggtgagacagctgttgtggagaagggggctatgctttaccacggtgtcactttaggtggtactggtaaagatgtcggaaaacgtcacccaaccgttcgtgagggtgccttggtttcagcccatgctcaggtcataggccctattgagattggaaagaatgctaaggtgggggcggcagccgtggttgttgcggatgtcccagaagatgttacagtcgttggtgttcctgctaaggttgtgcgtgttcatggtcaaaaggatgaagaagttatccacgatattgaagaaggccgtgaatactatagtgaaaagctagaagaccttctaaaagcagctagcttccactcatcacgtctataaggaaaggaaacgatgaaactctttagttcaaaggtgactcgattgacggttgtgggtcctcttgctcttgtttacattgctttacatagagcagactatagcatggccgccttatggttttgcattgctcttttatgggccggtctggtttttaagcaacgacacaagtgagatttgagtaatgaaaaaattcttcaaggacaatccttttttggtcttctatatagttgggagttttctttcagctatgtctctcttggctcaaggtcagctagttgcggctatttggattatcattctcgttatactcttgtgtttgtacctaaaccatatcaaggataaaaaatagtttccagttaattgaaaggaatctcaagtgattaaaatttatgatacgatgacgcgttcgctccgtgattttgtacctttgacagaaaatgttgtcaatatgtatgtctgcggaccaacagtttacaattatattcatatcggaaatgcccgttcagcagtagcttttgatactattcgtcgttattttgagtattgtggctatacagtcaactatatttccaactttacggatgtagatgataagattatcaaggcagctaatgaagctggtatttcaactaaggaattgtcggacaagtttatcgcggcctttatggaagataccggacaacttggcatcaaaccagcgacacaaaatcctcgtgttattaactatatggatgaaatcattgcattcgtgtcgaccttggttgacaaaggatttgcctatgtctctgaaggtgatgtttacttccgagtagctaagtcaaacaactatgctaaattggctaacaagaccttggaagatcttgaaattggtgcaagcggacgtacggatgctgaaacagaacgtaaggaaaatcctctggattttgccctttggaaagctgccaaagagggagaagtttcttgggacagcccatggggacctggtcgtcctggttggcacatcgaatgttctgtaatggcgactgaaatccttggagatactatcgatattcatggtggaggggcagaccttgagtttccacaccataccaatgaaattgcccaatcagaagccaaaactggcaagaccttcgctaactactggatgcataatggttttgtcaatgtggataatgaaaaaatgtcaaaatccttgggtaacttcgtgaccgttcacgatatgcttcaaacggttgatggtcaagtgcttcgtttcttcctagcgacacaacagtatcgtaaaccaattaactttacagaaaaagctatccatgatgctgaagttaatcttaagtatttgaaaaacacccacagtcttccgttgacagaacaggtgaatcaagctgagttgcaaacttatcttgatgccttccaagaagctatggatgatgactttaatacggcaaatggagtgactgttctgtttgacatggccaaatggattaattcaggcaattatgatcaaaacgttaaggatgcttttgaaaaaatgctccaagtcttcggtattattttcgaagaagaagtccttgatgaagatatcgaaaaactcattgaagagcgtcaagcggcgcgtgccaacaaggactttgcgacagcagaccgcattcgcgatgagttggctgctcaaggtatcaaacttcttgataccaaggagggcgtgaggtggacacgtgactaaacatcttgatgtcaaccttattaacggcattgctctcgcttttgagggagatgctgtttattccttgtacattcgccgtcacctgatttttcaaggtcagaccaagccaaaccaattgcaccgtctagctacacgctatgtttcagctaaggcccaggctagtctcattgaaaaaatgctagagcaagagcttttgactgaaaaagagctagacatctataaaagaggtcgtaatgcgaatagccataccaaggctaaaaataccgatgttattacctataaaatgtcaacaggcttcgaagcagtcatgggctatcttcatatgaccgaggatatcgctcgcttagaggaactgattgcttggtgtattgacgaagttgaaaaagaaatctaaaaattctgccgagagcaggattttttgttatctaaaggctataaaaattgtaacagttagccagagttttaacatttagattatttgagaatcaaagtaattcagcgtcttgacaatgaaaaaataagatgaaactaatatttagcaccttaaaaatgagaaagttaaagggtatctgacacgtgtaaaaccccgatattatagcgttttttaataaaactaatttgacagaaagtaaaaaaaaagtctataatattagtaaatgaggccataaaaaaatgaggaggtgaatggaaatagctaagaaaaaagttttctatacaacttttgctgctttgattttatctagctttacgcttcaaacaggtaaagcagatgaggttcaggtaaaatctgatgaagctaaaatagattatgttaatagtgaggcaccggctccagttgctcctcaggctgatttttcttcagtaggagctaaggcagagccagcgagtcaagtaagttcagtagtgacctcaacatcactgatggttgtctcttcaagtgagacagatgaggggcttcttgaggtacattctcaagttgatatcgtggagactagcgtttctacgacgacacctcattcagaagaggctcgtgcccaggcttttggtgaggatcgatcagtagcggcatctgaacgaggagatgcaaacccaacatctgattctgaacaagcaaaaccaaatattgtgcttacttatgataagtctcgtgaggctacagcaactgcagagtctcaagctgtgacttcaatgtataagagtgaaagcaccctatatacatctgaacttgctggaaatacacatgcagttattgaaaaatcagagtattcttcactggattctcatacgacatctgtaagtgcgactcctactagccaagctattgcaacttctgaagtcgcttctgagtctgcaagtactgcaagctctcttgcatctacggctccagaaacgagtcagttaaataataattcagaagatagcttaactgtccttacggttggctggaaagattcatcatcaacttctgaggtctttaaaacttctgaagtggtttctatgttgcaaagtgagagtttgacctattcgtcagaggtaacctttacggatggactcatctcagaaatcttagcgactccaatcacttctgaagtatataccgttgttccaaaacgagacagtactggagcgcttcttgaagatcaacctgctgttacagggaatacagatattctttatttagcacgtggtgaaatctttaacgtcaactttgatgttaacaagatggaaggtaagaagattaagggccttaatctagtccttgatggcaaacaaattcatcatagctactttgttgaaggaactctggatgaggtcaatgctggtttgagtgcctaccatttggcagagcaaacgactggtattcataaaatgacctttgagttgattgatacgaataataatattcattacctgacacagactttcagtgtctttaatgaaggtgagcgtccagtgacacctgatagttaccgtaggaatcagtattcatcaacaacgacaacaacgactgtaccggttacttataataccagtgcaaatagctacactgaaaccgccaatcatatacaagctacggctgttaatgagttggctgagacaactagagcgctaacacagcaattggcagaacaaattgctgaggttttgagtggttggtcttcagcgatttctggaaatagttcaacaagcacaggttcaattgatatcttccaagcaacaggtaaaaccattactcaagctgcgagaaagattgcagaatcaatctcagatccagatacaattggtaagcaagctttggctgctgcaactgttgttctcgttcttctagtgctttacctagcagcaattacatttatttaacatgctttgccctcgtaagagggctttttttatgatagaattagcttatgaaaacaactaaagaatcaagtctagacattgtttatggtgtgcatgccgtaacagagagtctggaagcaaatactggaaataaactctatattcaagatgatcttcgagggaaaaatgttgatgccattaaggctttggcagctgaaaagaaggtttccatctcttggacacctaagaaaaccttgtctgatatgacaggtggagctgtgcatcaaggttttgttcttcgtgtgtcagagttcgcttattctgaactctcagttattatggataaggctgaacaagaggagaatcctctagtcctcattttagatggactcaacgatcctcataactttggttctatcctacgtacagctgatgctactcaggtgacaggagttattattcctaagcatcgtgctgtgggggtaacacctgttgttgccaagacatcaacaggggctgtggagcatattcccattgcccgagtgaccaatcttagccaaactcttgataaacttaaagaagcaggcttctgggtatttggaacagatatggatggcaccccatctcataaatggaacacagctggaaaggttgcccttatcattggtaatgaaggtaagggaatctctgctaacatcaagaaacaagtggatgagatgattactattcctatgagtggtcatgtgcagagccttaatgccagtgtggcagctgcagttctcatgtatgaagtttatcgaaaccgattgtaactatgaaaaaaagaatacttctagttgatggttataatatgatcgccttttggcaagaaacccgtcaactctttaagaccaatcagcttgacgaagctcgtgaaacattgcttcgtaagctcaatcattatgctaactttgaacatattgatattatctgtgtgtttgatgctcagtttgttccagggagccgtcaacgttatgatcaatatcgtatcagtgttatttttactgaggaagatgagacagcagatagctatattgagcgcgcagcagctgagatgaatactgttcaaaatctagttgaagtagcaactagtgacttaaatgaacagtgggctatcttttcacaaggagctttacgtgtttcggcgcgtgagttggaagagcgtgtcaatacagtaaagtctgacttagacaagatgtcggtacatattgacttaaagacaccaaaactacgtccatgggacgatgcacaattagggaaattacaggaccttttaaatgaaatagaatagagggatttatgacatttaacattttgacagattccacagcagatctagatgaaaaatgggctcaggagaataaggtagagctcgttggtttgaccatcacgcttgatgatattgcctatgagaccgttggtcctaaccgtttaacgagtgaccgtctcttagaacgtatgcaagaaggcagtcagcccaccacaagccaggtgaatgttggtcaatttgaagaggtttttcgtcgtcatgccaaaaatggtgatgctcttctctatattgccttctcatcagtgctttcaggtacttatcaaagtgctgttatagcgcgtgacatgattgtggatgaatacccagaagctgtcattgagattgtagataccctggcggcagcaggtggggaaggttatctctctatcttggcggcagaagctcgtgaccaaggtaagagcttacctgaaacgaaagccatgattgaggacattctgccacgtttacggacctatttcttagttgatgatctctatcatctcatgcgtgggggtcgcctttctaagagctcagccattattggtagtttgattaatatcaaaccccttctttggttggacgcttcaggcaagttggttcctctggccaaaatccgtggacgcaaaaaggccattaaagaaatggtcctacaagctacccaggatattggacatagcacagcaattgttgcttatgccaatgatattgaagctgcggagaatctaaaagaacaattgttagcagttgacggtattgagaaagttctcattatgccacttggaccagtcatctctacccacgtcggaccagataccttagctgtctttacgattggtaaagaagctagatagaaaaagtgtcagataggatttcctatctgattttttgttttctgaaatgctagattaatagaatataaaaagataattcatacaaaatgaatgatatatttgacataacgtaaaatagtgctataatgaatctagaaaatggaggaaacaaaatgaaaaagtcaaagaaaaaagtagctagcacgatggatgaacgtgctcagttgattagcggagaatcttctgctagaggttattgggtagccatgcttggtctatttgtaacgattatggttgctagtaagacgcactccgtcgaattagtgcagtcactattaatcatcactttctttggttctatgtgcctagtattagttcacagcgtatcacgtaatgggcatccatggttgctagacaaaaaacttgaaaagaagatgctcagattatcctgggtaatgtgtttttttggaatttttatatcgctaatgggcctcttaagtctatttcagtcgtttaagatagggaagaatcttatgagtagtgtggcatttttgacattgggtttgacccttatttgcgactgctgggttattattaacagaatcaagaagaaccgtttggaagaactagaagacgaagaataggatttttgaatgaaaaatttaaaaatgaagtcagctcgtgtagcaaaggatctcactcaacaaggtttggcagatgctataggagtttctcgtcagaccatctcagctattgaaaaaggtgattataaccctactataaatctgtgtattgctatctgcaaaactctggacaaaactttagaccagcttttttgggagtctgaggattagtttgtactctttagatgttatttaggcatgaattctagtcttacaccttataaaatgatagactaaaaaaatacaaaaaataaaagaaaaacatctccaaatgacttgccttggatgtgtttttttgatattatgttaaacggtattgtttaccccatttgaaaggccccggaaccttccaaatacttttcgatgggaaggaacacccatcactcgtaaacaaaaatcgaactatatataggagaaatcatgaacaaaacaacatttatggctaaaccaggccaagttgaacgtaaatggtatgtcgttgacgcaactgatgtgccacttggacgtctttctgcagtagttgctagcgtacttcgcggaaaaaacaaaccaactttcacaccacacactgatacaggtgacttcgtaatcgttatcaatgctgaaaaagttaaattgactggtaaaaaagcaactgataagatctactacactcactcaatgtacccaggtggattgaaacaaatctcagcaggtgaacttcgttctaaaaatgctgttcgtttgatcgaaaaatcagttaaaggtatgcttccacacaacactcttggacgcgcacaaggtatgaaattgaaagtcttcgttggcggtgagcacactcacgctgcacaacaaccagaagtacttgatatctcaggacttatctaattctaagaggaaaggagcactaatataatggcacaagcacaatatgcaggtacaggacgccgtaaaaacgccgttgcacgcgtacgtttggttccaggtactggtaaaatcacagttaacaaaaaagatgtagaagaatacatcccacacgcagaccttcgtctcgttatcaaccaacctttcgcagttacttcaactgaaggttcatacgacgtacacgttaacgttgtaggtggtggatacgctggtcaatcaggtgcgatccgtcacggtatcgctcgtgcacttcttcaagtagatccagacttccgcgattcattgaaacgcgctggacttcttactcgtgatgcacgtatggttgaacgtaagaaaccaggtcttaagaaagctcgtaaagctagccagttctcaaaacgttaagaaacggctacaatacagcatttatcaacacttcatggttcacaccatggggtgttttttgatgtttttttggcaaaattcacaccacttttcacaccaaattcacaccattactttttaaggttacggtaggcaatttcaccaacagccattggtatgacatttgaagtgttgacataggtcttagttgtgagagtatcgctatgcgttagagcttctgaaatgtcctctagtgatgtgccaaattgtttggcaagagttgcacccgtatgacgtaatttatgaggtgtagcgtgtgttagttccttatgacggcgttcgactgacttcatcttattattaagataatcagcgtgtaagggactattaacatttccttttgtatcaatataagtaaaaacatactgttcatcagattggataatattgaattttgccaattccaatttttgttgttttttccaagcacagagtaaatcagttagttcaataggaatatggaaagttgtccttttatttcccttagttgattttggatttttatacttgtccaaggctttcactaactgaatttcttgtttctttaggttaatgtgtttccattgcaaagcgtaactttcggatttcctatctcctaagaaaaaagttgtatagaataacacataatctttgaataggagcttgtcgttttctaaatcttcttcaaaagcggtgaaccatgcttgaagttctgattgtgacagatataaatcttcatcatttttactctcttgtagtttaatttttttagttgccttaatacggctaattgttttagagagacgattagtttcgatatattccaattcctcagcccaatcaaaaatagaattaacgtaacttctaatgactttgaagtttgcatattcttctgccttttgtgtcaaaaggttcaagataacctgtttattttgattgagaaaatcaatggaataattaccaagcaagggtaggatatgttttctaaagacaatttcggtaccgtcaatagtagcttgtgaaggtggttttgtggtagatgttgtttgacctgctttataggattcccaccaaacattgtgataaaaatcggaaaagaggattgagccatttgtttccaatttggttgattctccgcttaaaattttatcaatcttgttttgtaattcaagttcgtattttttagcctcactccttaatttgaaacgtttttcaatcacttttttattaattcccaatgaggatttgacttcttctgggacatagatacgtaagcgataagttccgtttttagtttttgtaattgacatagtattctccttttttgaattgagctagaaaaataccgtggcttcattatatcaggccacggttagaatgctactgattttgtaaccagtgattaagttcggctctatcaaatcggacagtttttccaactcgaataactggtaaccccttttttatccaagaatcaagcgtattattggcaattcctagatacttacaagtttgttgtttgttcaagaagggactttcaatgttgttactatccaatttattttttatttcgttttctataagctggctaattaacagttgtagctgatgaatttgttcgtctggtaaaatcacttgcatagtcttttttgtcctttcatgatataatgttagcgattattatttctaaggcgatttgtttacggcaagtcgtctttttgtatgccccaagtgttggagctctggtgttcacggacatattgttcaatctccttttcatcgctgttagtaaatttcgataatcccaactttaagaggtcttggagaaattggtctgctctttcaagtgtggttgcctcatatttagccacatagagtttggctaaagtctttgagacctgtttttccgtccattgttctgactgtctaagcgttggcttggtacgttcaatactcaagcgagttttggtttccgtctggaggtaatcaagccaccatttgaccggctgtcttctgcgcttattggtgtccttgtcattaggtctgacaaagcggtagtgtccgttgatagcttcaaagtaaatggctgtcaaaggttttttaaggtatatttgttgagcaatgatattagctttgccttgccaacaacgtagctctgctctgacccaagaatgggtctcatcagtgactttaccttttcctttttgttccatgagtttgttataaacacaccattgttgacttcctcgtgcgcctatggtgaccgtctcaccaactcgttcgcccgtttcaagaattgaacgctcgtgatagtccatatattgtgctctcgtgatacacaagccccgtttacaataggcatagagggtttgaacggataatgctttatcgtagatgtcattagctatatctattcgggtaaagttgacctgatagcggtacaggcgtgtgaccagagctacccagttattaacgttacctgccataaattcctcatattgacgacaaccttttcctttaagttccagatagacccccatgttatctaagacttggttaaagtaaaccttgatgtctgaacaagcataatggcgttgatacttgtttattccccaagcattaagcgcaaacttatcttggggaatgagcagtatttcttccaaaacttcctctggtggaacatctttaacagtgacagcgaagtagtcaatcctcacgctgttgtccatgtttaattaccaaagattttaaggtcgtttgccactagttttacgccagaccagttactacgagtcatgttccacatgagacggacttgaggattgacgagttcaacggtcttatcaagcaacccgtcattttctgctagttttgtgattttgtcgaggttgtcatgaatttcaagcgtaatcgctttgagttcctcaatggcaatgttcatttcttttaacactttgattttatccgcatcttgaacgctacaaactagtttggatggttcgtctgttcggacttgttcgccatttacttcttgatacttataactcatacgagcagaaagtaccactacttttttaggaagcatgaattgacttttatcaaggttcaattcgccaagtttaagtgttgtgtcagttagtgttaagtttgtcatcgtatactcctttgtgttttttaaagtagttatcttttctaaacgtacgcagaattagctttgaaccctactctcccaagggatttcagcgaaaacttcaactgattggctttaaccccagacgtctcaaggagttagccctactttcgtgtacgttcgtaccccctattagtagtggggcacttattttagtggcaagtctcgcccgtttcgagcccctaccgccttgtgggctaccgtgttgaccactcgcccacggcgttggtgctgtaccgtgctcacttgccaaagagtgttcgcttcttagggtgttctaagacctctatgcgcttttccagtgcggtttggcgcaaggttagaacttgattatctctggttagtctctcaacctgattgttcagttgagacacttgaacagatagtccctgtacttgtttagtcaaaggaacaggtgaggcacgggttagcggatagactttgagaatggctttctctagtcccagactgccttttaaatgggcgacctgttgcaactgctcaatgtcactatcagtaaagagggtaaccttactgtaagaacgtttgcctgttcgtactcggctttcttcaaaggcatgtcctgttaagcgttcaatctttaagcgccatttctttaaggttgagacggagttcaaaccattaaccaatttaaccgtttggggataatcgtaaaagtgtgtcattttagcctccttccatttactctcaaggtaaaatattatataatcaagaggtaaataattattttacctatcgattattttcattatacaaaacatatttttactagtcaactaaaaagtaaaaacaaattttacctaaatagaaagtgtgaaatccaatgccagctttatataactatgccaatgtcttacgagcgggggagcttgatattaaatctgcccggttaaaagcaggaatgacccaaaaagaattgggaaaacttctgggtgtgaccaaacaaacaattattaactatgaaaaaggcactaccgaaccaagttgggagcgcctagaagatattgcgaaagccttaaaaatagatgttgacgaactctttccttatagtgagcttggtgaaaagaaaggggatttaaagtgggcagaacatctagaacgtttagccaacgattggcattatgctcgcacagcggaggaagaattactcttacaaagtcttttggactatgcagaatttcaaaaagaagtggagcagaagacctacaccacagaacagcttaatcaagcattggaactggaaaacactaacaccatgtctgatgaagataaaatagggcttatcactcttaaatatgaaaaggacattcagaaaaaaactgataatctgattgcactctacaaagaccaatcagaaaaagagcttgatgttattcgatttgaaaatacagatttataaaagggctaattctgaaataatttatagaatcttaaattagaatttataatacatcgtctaatcagacaaaaatattttaagcaagcaaaaatcctagaaatgttgattttataggatttatttgagtcgtcttacttaactccacgactgcttatcattttaaatgactgaaaaatgcccatttctataacaacagcagtataattgttaatcggaagtaagtccaatttttcaaagtaatttcgaatagtttcagcggtacattcttcaaatggaaattcattgctatgagggagaatgtatttgtcccatagaccgagaccagtataatctttgagttcagttgcaacattagggttgtcaagtaaagagctatactcaatgtttttagacgtaataatagcaccagcatattcctctatataaatcatttcttctgttatcctttgtttgacgattttgattaatcccttcttttttagttcctttcggataaatgtggtgtttatctgagtctaacatagatggctttttgtatctaacttaattttataaattgggcatacaaaaagccccgcaatatctgaatgagatccacccactactgaaattatagagtcagaaaaaaatattcttagcaacaagaagaattttgactagtaatgagccaaattagttaaatatggtagcttaaatgaagattagtaatttttaataaattgttgacaaattcttaagtaatgataaaatataggaaagcaaaagttaatccgattaacttttatttttggactcaagttaatccgattaacttaaacttttgcttttaaccttaaattaaatagatctatctaaggaggaagttattatgtacgagccaattgctatcattggatacggagttctatatccaccaaattcagataatgtacaaaacttttggaaaaacattaagaacggagttcaagggattagagaagtaactaacgaagtttggaatgtgaatgattattataatgaagatgaaaatgttcctgataaaacttactgcaaaaatagtgcatatcttgataatacgggttcattaatggattatatttccaagttcaatttagatgatggaaaaatattgtctttgaatagaactaaaaaaatggttttgtacactattttacaagcaatcgatgaagctaatcttaatataaatgaattaagagattcatcattaattatagggaatatgctcggcgatttagatataagtgattacatgttatataaatttggaaagaattatttaaatgaagtcgagaaaagttctttagttcaaaggggaagtctagaaaaaataacagataaatttggtagtagactgtatgaagaattagatttagaagatagaaatatagatccccattagtagcagtagaagtgtatgaaaaacaggaaggtggaagcattggtatagatattgaaaaaatatttaaaaatatctcaagtgaatttttagaatattgctttacttcgaaagaattagaatctatatcaaaaatttttaaacaaactacatttgaatgtagttgtaccatgttgtggtgtataaaagaatcagtggggaagcttttttcaataggcttatctggtaatcctaaaaaaatagagatattatttaaaaatttaaatgaattagaagtagttattcattcaaataaactaggggcttgtgtttatagagaacctctaagtttaaatgttgattttttagatggatattgcatttgtagtgcgaagatacgaggaggtatagataatgacatcaattatatcagtaaaaaatttaaagaagacttatcaacaaaggacagttgttgataacctcagttttgatgtagaagaaggtagtctattttcctttttgggacccaatggagccggtaaatcaacaacaatcaacattatttgtacagtattaaaatcctctagtggagaagtttttattgatggattagatgtcagaaaacatagtcaagacattagaaaaaaaattggggtagtctaccaacataatgttttggataatttactgacggtttcggaaaacttgagatttagagctagtttatatggaatcataggtaatgagtttgaaaatcgcttagaagaagtagctaatcaattagattttaaaaactatttgaatcaaccttttcatactttgtcaggtgggcaaaaaaggcgagttgaaatagctcgagcaatatttcatgaacctaaaattttattgcttgatgagccaacgactggtttggaccctgagtcaaggaaaactgtctgggagattattgggacattgaaaaataattttggaatgactatctttttaacgacccattatcttgaagaagcgagaaattctgatttaatcacagttattaatcaaggtagaattgttgcaacaggaacggctattgctcttcagaaaaagtattcttgtgaccgattatttttatatccttataaagaaacaatggagcaattaataactagtgtcaaaaatgtaccattgtcttacaaaatatccgacgatcatttaattattgaggatccaagcattggtaacgtaagggaaatattgaaatatgattcgttgatagattcgtttgagtactttaaaggaaatttagatgatgcatttatcaatattttaaaacaaacgggggatagtgtgtaatgattaaaagacatttaaagatttatatccgagataagggaacattaatttcctctcttgttgctattttcgttacaataggattatatctattatttttaggaaattatctagaaaataccatcgatcagtctattggaactaattctgggaatttcttgtttgttaatacttgggtgctatctggaattattatcgttagttcagttactatttctttaggagtatttggtgttaaagttaaagactatgaaacaggaatatataccagttttgctgttagcccagttaagaaattagtaattgtattcagttatattatagctgcttggctgatgagtcttgtgattacacttgttgtgttattgatttggactctagtaatggggatgttaggttatcaaataattacggtttccactattccactacttcttatttatattactctaaatagtttatcggcaaccagttttacattctttgtagtgaattttgttaaatctgtaactgcttttagttcggtttcaactatattaggaacgctaacaggatttttagcaggaatctatttacctataggagcactgcctagttatgttcaatatattatgaaatttttcccaccgacttatggtgtagcacagattcgtagtcttttaaccaaagaacctttgaaggctattacgaaaggtgatagttcgtctactgttgagcaacttaaactagatatggggattcatgtaaaaattttcaatcacgtattaaaaaattatgagataatttatttactgttgtttgttatagtgctatttattctattatctggttatcaattaagggagagaaaaaatgaatgaaaaaaataaatttcatcatggtgatttaaaaaatgaaattattaagcaaggtctaaaaattatatatgataaaggattccaatctgttgaactaaaagatatttcaaaggcttgtcatgtaagtactccatctatttataggcattttgatggaaagagtgatttgatggataaactacttattgaagtgtcgcatattttttataattttttaaagaaagaatgtcatcactcttatgaagatgctgaagaagatttgataaatatgggagtgagatttttacaattttctcaggactatcctcactattttgagtttttattttatagcaagtttgaacgtcatgtacaattaggaacagatatccagattgattataatgatgaaaacaatagcttcaatctatttaaagaagttgtaattcattatttcaataataatgggattaagcaggaccacaataggcacattgttaatctttggtcctatattagtggtttatctattattgctggtagtattgatagtgagaataaaaatataattttaagaaattatattcaaggcatgattaaatcatatactcttggaattaagcaggaatatggtatttgataggacaactattgttatttattcctatttatataagaaaaagtgatttggtaaaaactccaatattattaaattaatcccccttatttaggagattatgtgaaacgaaatacagcacagctcaaaggaaatttgattcaagcaggaatagaacaaatctgccaacatggcatagataatctatcactaaggaccgtcttacaaaaaagtcgtattacacacggtgctccctataaacactttggcagtaaagatggtatctcagaattgtcctatcacgtctttctgatttttgggccaatgagattttcgttggcatcacgtcattcacatcagcgagagatgaattgagtcaaatgggatttaactttgttttagctacacagaagaatccttatgtctttgaaagctctttttattaaatcgccctttaaatacatggagctttctggagatactattttagtagaaaaagacttacttggttttgattcttttaaacgtgttgttctagcactaagagaggagaaaggcttccataatagtgaagctgatactctctttcacttttgtagttttatctcaggcttggctattctatcaaaaaagttctatcggaacgaatttttcacaagcatctcttcgattattactcggagagatgcttgatatttacattaaaggagaaaacgcatgaatatattaattatcacggcccatcctaacccacaaagtttcaactcattcatccttaaacaagtacgagaaaacattgataagtcccataaacttcaagtacttgacctttatgctgaaggatttgatcccactttgcgttttgatgagaaacatcgaagacgtgatttagtctctaatcctaaaactgctaaataccgtgatttggtgacttgggcagaccaatttattttcatctttcctatttggtggtcagggatgccagcgatgctcaagggttttatggattgtgtctttgtcgctggatttgcttatcacaacactaagactggcttaaaaggccatttaaaaggtaaggcatggattattactacccacaatacgccatcttttattacactattttctcaagactatggtaaggtccttaaaaatcagattttaaaagcctgtggtatttcaccagtcaccatcagtcgaattgctggtgttgaaacaatttctgatcagaagcgacaaaaggccttggataagattatcctgaaagcaaaaaatctataaattattagaatacaatagtggtgtgaatttttagtatttaatagctcaattcaatgctttttagggtaaaattcacaccattccgacgaaattagttgaaattgattgaaagtgtgctttcagaaaatcgtggaaataattgatattaaaggcttttgaaatttattcaagcaaaagttgttcaaaccaggtcttaagaaagctcgtaaagcatcacagttctcaaaacgttaattcgttgctgggaagcacaatacaaacgaaaatactttgcaacttgcaaggtgttttttgtatgagaattggcggtgcgcaattaggatagctctagcgactttagtcgcatagagatatgctatgcatagttgccccaagaaaacaagcgaagcgacatttgattggatggcaaccactgcactcaaaacgttaatcgatacgattatatcaacgtttcaaagcactcaagagtttacctcatgggtgcttttttgtatagatttctgaaaattgttcaaaatcttactagagttttgtcttcatcttgaaattcttataacaatgtgatatatttataacagataaggtgtgatgtatttataacatggtgaaagaaggtgacgaaaatgaaaatgtcgaagaacttaaagataatcctttatatcgctagcgtgcttattgttgtatgtttagttttattgctggggaatcacctaccgattctagcaaaaggtgctattatgacgatgtcttggcttcctacgtatttggcttgtacgatgcaatcggtcctctcaaaatcaacctatcaaaagaaagagaaaaatatgtttgggattactgcaaaattatatacagtgcttgtacttctctcgtcatcgatctatacaattggagtttggcttctaactcctggttctttgattaagaatataatgttaggaattggattaagtgttcaattgttattaatgttttacttcttattcaagagaattaatgaagaacctgatgaacgattttatagaaatattgcaaagtcctcttccattttgtttacaatagcaatctttatattattgggaattgcaaccttgatagctgtctgtaaagttttcgttttgaatgctggatttctttatattttggtggcttttttactcttattatttgccattacttactttatcattgaaaaaaggggatgaaatatggcgaaagaaagtaaaataaagactaacttgaaagaagtaagggaagcttatggtatgactcaacaagatttagcagatcaagtaggaatacggagagaaacgattgttcacttagaaaataaccgctacaacccttcgttggaaatggctttaaaaatagcacaagtctttaataaacaagtggaagaactatttcgtctgaaataagagaagtaaaacaatccaattgatttgtgtattagttttttggagacttgtttttctgagaagaggttttggtaagagggagtgttttcaaaggaattttcttgacttcaccttagttgaaacgcattcaaaaataagataatagtttatttttcaagcattttaacccaataatagaactttttaggccgaaatactttcaaaaatgctaatatttctctaatctattcaattttgaggtcttgcatattatgtagttatcatacaaaagcgctcagagtgaatgagtacattcatttgaaagatgatattgttatatacttcaaacatattatcagtaaagggttttatgcgtctattaaatatctcttgatttttggccaaaaaacttcacataataatgaatgtatattttacaaattatgcttttatatatgatttaaatttgtatttaaacttagcagaggacataataaattacctaaaataacattaaaattaaaaatgattaattattactatttggtaacagacttcaaaaaccctttgtttgtaggaattgtaggatatattaaaaatttaaaaaagtttttaaaaattgttgacatatctctagatagtgttataatctatagatgtcagggaggtcctgatactaaatatataataatccattagaggagaaacaattatgaaaaaagtattgcttacatcagctgcagttcttgcagtattcgcttcatcagcagcagtattcgctaacgacggtaacgttcacactggaaaccttgataacaaaactgaagcaactggtggtgacttcttcacaaacaacgaaggtggtcttactcaagctgctaaagatggtcttaacaacgttgacgcagattcaactaaacaaaaatttgaagatgctggtgaacacatcgaaccaaaacgtgatgctaacggaaacatcatcaaagatgagtttgtagttactgataaagctaacgctaacaaagacgctaaagaagaagctaaagctgttaaagctgcagaaaagaaagctccagcagctaaagctgaagctaaagctcttccaaacacagcagctgttaaataattaactgctattgcaaaaaagaatatcactggggctagagcttcggtgatatttttctatggataaagaaaaggatttgacatttcatgagtaatcataatcgtaaatctactggatctcgcaaaaaactgattgctgggatttcggccttagtcattgctgctttggctatcttccttggcttccagtttatgtctccgacagcatcatcctctaatggtgttaagagtgttttaacgactaaaaaagcaaacacttataaagtttcagatgaggagaaagcctacctcaaaaataaatttgatggtcttgaggcgacaaaccctgatactatcgcttatgtctatgcaccagggactaaattggatgagccagttgttcaaacaacggacaattcaacctacttagataaaacatttgatggaggaaacgttccatatttgggaactgtcttcatggatacagataataagaaagattttagcgatcgtttgacttggctcttcggtcatgctcgaggaagtaaggttgctgatagtcgtatgttcaacgatgttaactactatagtgatcagtcgttttttgataaacacaaatatgttgttattgagacgcctcaacgtaagtattattatgaagcgcttgctatggtaattgtgcctgaagacacagctttctatcgtacatcatttgaaagcgataaagactttaaacaacagttggatatcatttatgatcaagcaagtgttaaaaacaaggatttgaaggttagtgcttcagataaatacctcgttctttcgacttgtcgtgaggaagatgaaacgattcgtgctaatctctacttgcgtcaaattccagactctgaaatgtctgattttgtagctaaacacggtaaagatttggaatacacaccaacacgttaatcattaacaaaactctacttcatatgaagtagagtttttatcttgtctaagaaaactgatgttttcaaccgtcgtggaattgagatgtaaccgtttattaatcttttttatcatcaatggataagtttttttggtacactagaagtatgaaaaaggagagtattatgaaacagagccaggctaaaaagcgtgacaatgcgatgactaataagattttgatggggttgattgctctcgtcttaggtttgctttttcttgagattttaattgttcatagtaagaacgaacagcaaaagaatgcctcgaaccaggtacagacagcacgtatcatggctaatggggacttgctctatcatgacggtctctatatgagtgccctgcaggcagatggcagctatgatttcacggagaattttacttatgtgaagccgtggttaaagcaggctgatttggttttgggtgatttcgagggaacgattaatcctgattatcctttgtcaggctatcctctgtttaatgctcctcaatcagtgacagcagctattaaggatgctggttatgatgttatggatttggcccataatcatatcttggattctggtttagagggagcttttacaacggctgatgcttttaaaaaagtgggaattgatcctattggcgtttacgaaaagccggtgcgagacaaggcaccacttcttatcaagaatgttaatggtatcaaagttgcaatactttcctatgcttatggttacaatggcctagagtcgaacttgacggataaagaggttgcagaccacttatcgaatttggatgaaaaacgtatgaaagccgagattcagcgtgccgaaaaagaagcggatatcacggttatcatgcctcagatgggtgttgaatatcgtttggaaccgacagatgaacaggttaaactttatcataagatgattgattggggtgccgatattatctttggaggtcatcctcatgtggtagaaccttctgaggtggttaaaaaggatggacagcaaaaacttattatttactcaatggggaatttcatttctaaccagcgcatagagactatggatggtgtggatagtgcagagtggacagagagaggtgtcttaatggatgtcacccttgagaaaaagaatggtcaaaccacgattaagacggctcaagcacatccgacttgggttaaccgtacgcctaaaggaacaagttcgccagagggataccctttgtatacttaccaaacttatattttagaggatttcattaaaggtggtaaatatagaaataaactggatgaagaaaccaaagagcgtatagatactgcttataaagaaatgaatgcccatgttaatttaaaatggaaataaagctaagatatcgcctgaatttggcgatatttttttgtttatcgacaagttacccacagacttatccacaggtgtggaaaagtctgttgatagtgttgaatcttgatttttcaaggttttataagaaagatattatttaggttgtgaacaagtttatccacaagtagttggggcaaagagaggatattttcataaacgatattagttaaattcctcggaaacattcgtctttttcaagaaaaaatatgcaaatttcataaaaaatagcatttttaatcaaaatatgctaaaattatacaaaataaaatgatggaggcttctcatgaaagcgattattacagttgtaggtaaggacaaatcaggtattgttgcgggtgttgcgactaaggtggcagaacttggcttgaatattgatgatatttctcaaacagttcttgatgaattctttaccatgatggcggttgtatcatcagaagacaaacaagattttacacacctacgtgctgaattggaagcctttggtgagtcattgaacgttaaaatcaacatccaaagttcagcgatttttgatgcgatgcacaacttgtaagataggagtagcttaaaatggatattaaacaggtcacagaaaccattgccatgattgaggaacagaattttgatgttcgtaccattaccatgggaatctcactcctagactgtatcgattcagatatcgataaggcagctgaaaaagtatataacaagattgtatctaaggctaaggatttggtaactgttggcgacgagattgcggctgaacttggtattccgattgttaataaacgtgtatctgttactccgatttcaatcatcggtgcggcaacagatgctacagactatgtaccttttgcgaaggcgcttgaccgagcagctaaggaaatcggcgttaactttattggtggtttctctgcgctcgttcaaaagggttaccaaaaaggtgatgagattcttatcaattctattccacgtgcgcttgctgagactgattttgtctgttcgtctgttaacattggttcaacaaagactggtattaacatgacagcagtacgtgacatggggcgtatcatcaaagaggcttctcaggaagatccaatgggtccaggtaagttggttgtctttgccaatgcggttgaagataatccatttatggcaggtgccttccacggtgttggtgaggctgatgttgtaatcaatgttggggtttcaggtcctggtgttgtgcaacgtgcagttgagaaagttccaggcgaaagtttcgatgttttagctgaaacagttaagaagactgccttcaaaatcacacgtgttggtcagttggttggtcaaatggccagtgaacgtcttggtgtcgagttcggtattgtggatttgtctcttgcgccaacaccagcagttggtgattcagtagcccgtgtccttgaagcgatgggtcttgaagttgttggtacgcatggtactactgcagctctagcccttcttaatgaccaagttaaaaaaggtggtatcatggcatgtaaccaagttggtggtttgtcaggtgcctttattccagtttctgaagatgagggtatgattgcggctgttaaatctggtcatatcaaccttgaaaaattggaagctatgacagctatctgttctgttggtctagacatgattgctattcctgctgatacgccagatactacaatcgcggccatgattgctgatgaagcggctatcggtgttattaaccagaaaacaacagctgttcgtattattccttatggtaaggaaggtgacatgctggaacttggaggtcttcttgggtatgcaccggtaatgaaggtaaacaaagcttcatcggctgacttcattgcgcgtggtggtcaaatcccagctcctgttcacagctttaaaaactaaacggatgataaatgctttgccaattggtaaggcattttctgatggtctcgctggctagatagtcgaggggatttgtgctataatgaattcaaaaatgacggaaagaaggggcactatgagtaaggttaagttgtatattgcaagacacggcaaaaccatgtttaacaccattggtcgtgcacaaggttggtctgatagcccattgaccccattcggtgaagaaggtattcgtgaattaggggtaggtctgaaagcagcaggtattccttttaaagctgcatattctagtgattcaggtcgaacgattcaaactatggatatcattttgcgtgagacgggtttagaaactattccctataaacgtgacaaacgtattcgtgagtggtgttttggtagtttagatggtggctatgatggtgaacttttctacggtgtgctaccgagaacagatgcttttcaaggtaaggagttacatgaggtaacttatcctgaacttgcacaaggtatccttgatgtggatacggctggttgggcagagtcttgggaagtgctcagaaaacgtattatagaagggtttacagctattgctgaggatcttgagaggtctggtggtggtgatgctatcgtcgttagtcacggtatgactatcgcaacttttgcatggttaattgatccttctgtcgagcatccttcattggacaacggttcggttactgttgttgtttatgaaaatggtaaatttacattagaagcacttggcgatatgacttatcgtcaggttgggcgagagataatagaaaaagaaaatggtaaaaaataactatccaagtcgccgtcaggcgaaaaagcaaaccaactggtttttggttatcagtagtgtcttgattgcagtccttttagttgcagcaggactttattctgtatttggtgtcaatcgtacggttcaacaaaccaatagatcgtcggtaataaaaggtagtaagcaagctaccgatgtgactcaaagcaaggatacaaagggactacctgatgtatcgcctaaagactgggaattgcttttggtaaatcgagataataagtctaaagaacttaatcctgagattgttgatgtcgatggtgtttctgtagatgcgagaattgctaagaatgttaaggagtttttagcagctgctcaagaaattgatccaagttaccacttgatatcaggttatcgtagtgttgcttatcagacagaactttataacagttatgttcagcaggaaatggctgctgacacaagtttgacggagtctcaggcggagaaaaaggttcaaacctattcacaaccaccaggagcgagtgaacaccagacgggtcttgcgattgatatgagtactgtagatagcttaaatgaagcagatccagatacagtagctaaagtcaaagagttggcgccgaaatatggctttgttcttcgttttccagatggtaaaacatcatcaactggtgtaggctacgaggattggcatttccgctatgttggtaaagagtcggcagagtatatgactgaacataatcttactttggaggaatatttggcattattaaaggagaaagctaagtgagacgacgttttaaactaaaagccttcattaccttagttgttgtttttgctttaggtattctcttacctttgattcttcatgcctctacagatgataatgctcgtgcggtaaaggttgcttacacacagcaagaatttattgagaccttagctccaacagctcaaaagatgtctaaaaactatggtgtacctgcgtctattctccttagtcaagctgcatatgagtcaaattatggtagcagtcttttatctgttaaatatcataacatctacagtctccctgctcagccaggtcaagaacgtattcgtttaaaggatagtatctacagtaaagggaaatggcaataccaaaaggtggattttgcagtttttaaggattggtcaagttctatgatgacttatttagaagaacttcgccaaggaacatggggcgagtcgacctataaagaggtagcaggaacgactagttataaagttgcggcagaaaaactacaagctgcgggttttagcagtgatccagattatgccaaacacctcatatctattattgagacctatcatttgtcaaaatatgattgataagattagagtgcctctgaggtgctctttttttgcttttctaggtcttaagatgtatttttagcactcttattataagagtgctaattttttggttttttgggttgacatgttcaagtttaggtgtataatagaatcataagttagcagtcgatgtgttagagtgctaataaatagaaatgaggtgacatcgtgattacgcaaaggcaaaacactattttgaatttgatagttgagatgttcactcgtacacatgaaccggttggttctaaagcattacaagaatcaattgattcgagttcagcgaccattcgtaatgacatggccaagcttgaaaaaatgggctatcttgaaaaagctcatacttctagtgggcgtatgccaagccgagcaggtttccagtatttcgtcgctaattctttgaatcttgatacgattgatgaacaagatgtttatcaagtggtcaaggcctttgattttgaagcctttaaacttgaagatatcttggatgcagcggcgaagctgctggcagaaatgacaggatgtacagcagtgattcaagatgtggaaccgacacgacaacgtctgactggatttgacattgttcatctatccaatcacgacgctttagcggttcttactctagatgaatctaagcctgtgacagttcaatttgctattccaaaaaatttcttgtctagtgatttggaaattcttcataagcttgttcaagaacgttttttaggaaacactgtcttagagatccattaccgattgagaactgagattcctcagattgtgcaaaagtatttcaagataacagataatgttctagatttgtttgattatatcttttcacaactttttaaggaattgattttcatcgaaggtaaggttgcatcactgacttatgccgacttaaaaacctatcaatttttggacaatccacaacatgtggcacttgagcttcgatcagctatctccgatgatgaagtgaccaagatttcggttgcagaatcaactgaagaagcgcttgaaaatgtcacagttatgagtcataaattcctaattccttatcgtgggatggcactcatgcatgtgattggtccagttgaaatggattatcgtcgcatggttagtttggtcaatgttattagtagagttttggttatgaagttgacggattattaccgttacctcaatagtaaccattatgaagttagctaaaatataacatttaaaaagtatagaaagaggtgtatgccttgactgaagatattaaaaaagaagacgtgaaagaagaggaagctacggagacaactgaagaagttgtagaggaagtaagcgaaccttctgaacttgaagaagcccaagcgcgtgccgaagaatttgaaaacaaataccttcgtgcccatgcagaaatgcaaaacattcagcgacgtgcaaatgaagaacgtcaacaattgcaaaagtatcgtagccaagatttggcaaaagcgattttgccatcacttgataaccttgaacgtgctcttgccgttgagggcttgactgatgatgtcaaaaaaggtttggaaatggtgcaagaaagtttagtgcatgctcttaaagaggaaggaattgaagaaattccagctgatggtgatttcgatcataacttccacatggcaattcaaacaatgcctgcagatgatgaacatccagcagacacgattgcacaagttttccaaaaaggatataaactccacgaacgcgtcttacgcccagccatggtagttgtatacaactaggatacaaagtccgtaaaagctcacagtaaaaataggagattgacgaagtgttcgatgaacacaaggaaatctatcttttttacccagagcttagggcgtgttcaactaggcaattctgacggttgctgaagcaactcgtcagaaaacggcaagcgccatagcgattgcctagcctccttactaactcgtcgtcaaaataaaatcgatttcgacttcttgtgtcgtaacataattgaaaacttgtccgaaatgacagaaaactatgaatgaaagataaaaaaagcaaaatagaaattaaagtaaaaaggggaaaaacatatgtctaaaatcattggtattgacttaggtacaacaaactcagcagtagcagttcttgaaggaactgaatcaaaaattatcgcaaacccagaaggtaaccgcacaactccatctgttgtgtcattcaaaaacggtgaaatcatcgttggtgacgctgcaaaacgtcaagcagtaacaaacccagatacaatcatctctatcaaatctaagatgggtacttctgaaaaagtttctgcaaacggtaaagaatacacaccacaagagatttcagctatgattcttcaatacttgaaaggttatgctgaagattatcttggtgaaaaagtaactaaagcagttatcacagttcctgcttacttcaacgatgcacaacgtcaagcaacaaaagacgctggtaaaatcgctggtcttgaagtagaacgtatcgtcaacgaaccaacagcagcagctcttgcttacggtttggataagactgataaagaagaaaaaatcttggtattcgaccttggtggtggtacattcgacgtatctatccttgaacttggtgacggtgtctttgacgtgttggcaactgcaggggataacaaactcggtggtgatgactttgaccaaaaaatcatcgaccacatggttgaagaattcaagaaagaaaatggaatcgacttgtcaacagacaagatggctcttcaacgcttgaaagatgcagctgaaaaagctaagaaagacctttctggtgttacttcaacacaaatcagcttgccattcatcactgctggtgaggctggacctcttcacttggaaatgacattgactcgtgcgaaattcgatgatttgactcgtgaccttgtagaacgtacgaaaactccagttcgtcaagccctttcagatgcaggtttgagcttgtcagatattgacgaagttatccttgtcggtggttcaactcgtatccctgccgttgtagaagctgttaaagctgaaactggtaaagaaccaaacaaatcagttaaccctgatgaagtagttgccatgggtgctgctatccaaggtggtgttattactggtgatgtcaaagacgttgtccttcttgacgtaactccattgtcacttggtatcgaaacaatgggtggagtgttcacaaaacttattgaccgcaacactactattccaacatctaaatcacaagtcttctcaactgcagcagacaaccaaccagccgttgatatccacgttcttcaaggggaacgcccaatggcagcagataacaagactcttggacgcttccaattgactgatatcccagctgcacctcgtggtattccacaaatcgaagttactttcgatattgataagaacggtatcgtatctgttaaagctaaagaccttggaactcaaaaagaacaaacaattgtcatccaatctaactctggtttgacagacgaagaaattgaaaagatgatgaaagatgctgaagcaaatgctgaagcagatgcaaaacgtaaagaagaagtagatcttcgtaacgaagttgaccaagctatctttgcgactgaaaaaacaatcaaagaaacagaaggtaaaggcttcgacacagaacgtgatgctgctcaatcagctcttgatgaacttaagaaagctcaagaatcaggcaatcttgatgacatgaaggctaaattggaagctcttaacgaaaaagctcaagctcttgcagttaaactttacgaacaagctgcagcagcacaacaagctcaagcaggagcagaaggtgcacaaacagcagataactcaggcgacgatgttgtagacggagagtttactgaaaagtaagatgtaaagtccattaaaacctcacagtaaaaataggaagatttttctttttcaccaagaggttagggtgtgctcagttcggtaaggtgttgagcttagctagtaaatgataaaaagaaatccagaggttgcaaaccagcctctgtttttcgctaaaataagtgaagtgaatataagatatagttttacttcgtatcgtaacaaatataaaatagaaaggaacaaagagtgttcgtcgttgaacacgggctagggattaagccaaaaagatagttggtttcaagggactaggtgttcatcttcaaaactattactttggctttctccattagatgccctttgtatctaaaattatgaacaataccgaatattacgatcgtcttggggtatctaaggatgcctctcaagatgaaattaaacgtgcctatcgtaagatgtctaagaaataccacccagacattaataaagaaccgggtgcggaagaaaaatataaagaggttcaagaggcctacgaaactttaagtgatgaccaaaaacgtgcagcctatgaccaatacggaccagatggtgcgaatggttttggtggtcaaggaggctttggtggcttcgatggtggtgcaggctttggtggctttgaggatatcttctctagcttctttggtggtggtgctactcgtaacccgaatgctccacgtcaaggtgatgatcttcagtaccgtgtcaacctaagcttcgaagaggcgatttttggtgccgaaaaagaagttcactacaatcgtgaagcaacatgtaagacatgttcgggatctggtgcaaaacctggcacaagccctgtaacttgtggtcgctgtcatggtcaaggggttatcaatgtcgatacgcaaacaccacttggtatgatgcgtcgtcaagtaacctgtgatgtctgtcatggaacaggtcaagaaattaaagagccatgtcaaacttgtcacggaacaggacatgaaaaacaaagccacaaagtatctgtcaagattccagcaggtgttgaaacaggtcaacaaatccgtcttgcaggtcaaggtgaagctggtttcaatggtggtccttatggagacctctttgtaatcatcaatgttaatccaagcgataagtttactcgtgatggatcaacaatttactatacacttaacatttcctttgtccaagctgctcttggtgatactgtcgaagtaccaacagttcacggaaatgttgagatgaccattccagcagggactcaaacaggcaaaactttccgtctaaaaggaaagggggctccacgtcttcgtggaggttcacaaggagaccaacacgttacagttaagattgtaactcctacgaagctaaacgatgctcaaaaagaagctctccttgcatttgccaaagcaagtggtgatgaaaaaatcgcaccacagaaaaaaggtttcttcaataaagtaaaggatgccttagaagatttataaaggaaggacgttgaaggcgtctttttctttatttcgaaaattgtatggggtcagttgctaatcgacctacttcttatccttgaaaaaatctgatatgataatcttatggttagatacaaagcgacaatttcctatgatggtacacttttctcaggttttcaaagacaaccaaatgcacgttctattcaagaagaacttgaaaagactctcttacggttaaatagcggaacacctgtcaccgttcatggagcgggtcgtacagatgcaggtgttcatgcctatggacaagttatacacttcgatttgccccaggagcgggatccagagaagttacgttttggtttagatacacaatgtccagatgacattgatgttgttagtattgaacttgtatcagaagaatttcatgcacgatacaataaacacagtaaaacctatgagtttctagtagatgcagggcgacctaagaaccccatgatgcgtaattatgcgacccactatccctaccctctaagtttagcacctatgcagaaggctgctaaggatttggtcggtacacatgattttacaggcttcacagcttcaggaacttctgtagaaaataaagtacgcacaattactcaggctagtgtatctatcgatgagaaaactggattttatatctttactttttctggcaatggttttctctataagcaagttagaaatatggtcggtaccttgttgaagattggcaatggtcgcatgcctgtttcacaagttaagacagtgttggaaagtcgtgatcgtaatctcgcaggaccaacggcagcaggaaatggattatatttgaaggagataagatatgagtgatgaattgattttagcgatttcagggaatgatatttttagtggtggcggacttcatgcagatttagcgacgtttaccactaataaacagcatggatttgtggctcttacctgtttgacagctatgactgagaatggttttgaggtcattccggttgatactaatgtttttaaacaacaacttgactcactaaaagatgtcccattctcagcaataaaaattggtttgttgcctaacgttgaaatcgcagaattaacgttggattttgttaaaaaacattctgatattccaattgtcttggatcccgttttagtatgtaaggagactcatgacgttgaagtttctcaactacgtgatgaattggttaaatttttcccttataccacggttatcactccgaacttacctgaagtcgaactgcttatagatagaaaggttaagactattgatgacatgaagcatgcggctagctatctcaatgaattaggtgctaagactgtcgttgtcaaaggtggaaatcgcttggatggtaataaagcgatagatgtcttttatgatggaacagactacaaattgtttgaagaagctgtgctggataaaaataataccggtgcaggatgtacatttgcttcaagtatagctagtgaattagttaaaggatgttcagaaactgaagctgtggcaaatgctaaagcctttgtttatgaatcaattaaacaatcaaatgaatttggagtagttcaatatgcaaaataagaaaacaaaagagctaacattattagctatcttaactgctttatcagtgacctttggattcgtagctaaaattccgactccaacagggcttttaactttggtagatgcaggaatctacttcacatccttctatcttggcaagaaagaaggagcaattgtaggaggattatctgcatttttgatagatttgctatcatctgctccgcaatggatgttcattagtttgttaatccatggtgcacaaggttattttgctggatttaaaggtaactatcgtatcctaggccttctgattgctacaattgtgatggtgggtggctatgcacttgcttcagtatttatgtatggaacaggagcttcaatcgcagaagtgattcctaatttctgccaaaacgctctcggcctagtcgttggatgggtattgtatcaaggattcaaaaaggttcaatctaaaaaagattaatagctttactaaaatcctattgacaagtattgatttggatgttaagatataaaagttgtcttaacagacttgccataaacttgaaaaggttccaaaactttaaaaaagttattgacaagacaggccagagatgatattataaataagctgtttcgcgagagatagcagacacgagaagtaaaaaaacttcaaaaaagtgttgacaaggtattctagatttgctagaatatagaagttgtcttaagagagacaaagacctttgagaactgaataagaaaccaagtgcagggttatgatagaagaattataacctgtcaatttacaagaataaatcgtcagacgacggtaatgagttaacgctcgaacaattattaaaatttttaatgagagtttgatcctggctcaggacgaacgctggcggcgtgcctaatacatgcaagtagaacgctgaagagaggagcttgctcttcttggatgagttgcgaacgggtgagtaacgcgtaggtaacctgccttgtagcgggggataactattggaaacgatagctaataccgcataacaatggatgacacatgtcatttatttgaaaggggcaattgctccactacaagatggacctgcgttgtattagctagtaggtgaggtaacggctcacctaggcgacgatacatagccgacctgagagggtgatcggccacactgggactgagacacggcccagactcctacgggaggcagcagtagggaatcttcggcaatgggggcaaccctgaccgagcaacgccgcgtgagtgaagaaggttttcggatcgtaaagctctgttgtaagtcaagaacgagtgtgagagtggaaagttcacactgtgacggtagcttaccagaaagggacggctaactacgtgccagcagccgcggtaatacgtaggtcccgagcgttgtccggatttattgggcgtaaagcgagcgcaggcggtttgataagtctgaagttaaaggctgtggctcaaccatagttcgctttggaaactgtcaaacttgagtgcagaaggggagagtggaattccatgtgtagcggtgaaatgcgtagatatatggaggaacaccggtggcgaaagcggctctctggtctgtaactgacgctgaggctcgaaagcgtggggagcgaacaggattagataccctggtagtccacgccgtaaacgatgagtgctaggtgttggatcctttccgggattcagtgccgcagctaacgcattaagcactccgcctggggagtacgaccgcaaggttgaaactcaaaggaattgacgggggcccgcacaagcggtggagcatgtggtttaattcgaagcaacgcgaagaaccttaccaggtcttgacatcccgatgctatttctagagatagaaagttacttcggtacatcggtgacaggtggtgcatggttgtcgtcagctcgtgtcgtgagatgttgggttaagtcccgcaacgagcgcaacccctattgttagttgccatcattcagttgggcactctagcgagactgccggtaataaaccggaggaaggtggggatgacgtcaaatcatcatgccccttatgacctgggctacacacgtgctacaatggttggtacaacgagttgcgagtcggtgacggcaagctaatctcttaaagccaatctcagttcggattgtaggctgcaactcgcctacatgaagtcggaatcgctagtaatcgcggatcagcacgccgcggtgaatacgttcccgggccttgtacacaccgcccgtcacaccacgagagtttgtaacacccgaagtcggtgaggtaaccttttggagccagccgcctaaggtgggatagatgattggggtgaagtcgtaacaaggtagccgtatcggaaggtgcggctggatcacctcctttctaaggaaaaacggaatgtacttgagtttcttatttagttttgagaggtcttgtggggccttagctcagctgggagagcgcctgctttgcacgcaggaggtcagcggttcgatcccgctaggctccattgaatcgaaagattcaagtattgtccattgaaaattgaatatctatatcaaattccatatgtaattaaatacatatagatagtaacaagaaaataaaccgaaacgctgtgaatatttaatgagttaggtcgaaagaccaaaataaggttaagttaataagggcgcacggtggatgccttggcactagaagccgatgaaggacgtgactaacgacgaaatgctttggggagctgtaagtgagcaatgatccagagatgtccgaatgggggaacccggcaggtaatgcctgtcactcattactgttaaggtaatgtagaggaagacgcagtgaactgaaacatctaagtagctgcaggaagagaaagcaaaagcgattgccttagtagcggcgagcgaaacggcaagagggcaaaccgaagagtttactcttcggggttgtaggactgcaacgtggacttaaagattatagaagaactacctgggaaggtaggccaaagagagtaatagcctcgtattcgaaatagtctttatacctagcagtatcctgagtacggcgagacacgagaaatctcgtcggaatctgggaggaccatctcccaaccctaaatactctctagtgaccgatagtgaaccagtaccgtgagggaaaggtgaaaagcaccccgggaggggagtgaaatagaacctgaaaccgtgtgcctacaacaagttcgagcccgttaatgggtgagagcgtgccttttgtagaatgaaccggcgagttacgatatgatgcgaggttaagttgaagagacggagccgtagggaaaccgagtcttaatagggcgcattagtatcatgtcgtagacccgaaaccatgtgacctacccatgagcaggttgaaggtgaggtaaaactcactggaggaccgaaccagggcacgttgaaaagtgcttggatgacttgtgggtagcggagaaattccaaacgaacttggagatagctggttctctccgaaatagctttagggctagcgtcgatgttaagtctcttggaggtagagcactgtttgggtgaggggtccatcccggattaccaatctcagataaactccgaatgccaacgagatataatcggcagtcagactgcgagtgctaagatccgtagtcgaaagggaaacagcccagaccaccagctaaggtcccaaaatatatgttaagtggaaaaggatgtggggttgcacagacaactaggatgttagcttagaagcagctattcattcaaagagtgcgtaatagctcactagtcgagtgaccctgcgccgaaaatgtaccggggctaaaacatattaccgaagctgtggatacctttataggtatggtaggagagcgttctatgtgcgaagaaggtgtaccgtgaggagtgctggagcgcatagaagtgagaatgccggtatgagtagcgaaagacaggtgagaatcctgtccaccgtaagactaaggtttccaggggaaggctcgtccgccctgggttagtcgggacctaaggagagaccgaaaggtgtatccgatggacaacaggttgatattcctgtactagagtatatagtgatggagggacgcagtaggctaactaaaccagacgattggaagtgtctggccaagcagtgaggtgtgatatgagtcaaatgcttatatctataacattgagctgtgatggggagcgaagtttagtagcgaagttagtgatgtcacactgccgagaaaagcttctagcgttaattatactctacccgtaccgcaaaccgacacaggtagtcgaggcgagtagcctcaggtgagcgagagaactctcgttaaggaactcggcaaaatggccccgtaacttcgggagaaggggcgctgacttatggtcagccgcagtgaataggcccaagcaactgtttatcaaaaacacagctctctgctaaatcgtaagatgatgtatagggggtgacgcctgcccggtgctggaaggttaagaggagtgcttagcaatagcgaaggtatgaattgaagccccagtaaacggcggccgtaactataacggtcctaaggtagcgaaattccttgtcgggtaagttccgacccgcacgaaaggcgtaatgatttgggcactgtctcaacgagagactcggtgaaattttagtacctgtgaagatgcaggttacccgcgacaggacggaaagaccccatggagctttactgcagtttgatattgagtatctgtaccacatgtacaggataggtaggagcctatgacctcgggacgccagtttcgagtgaggcgttgttgggatactacccttgtgttatggctactctaacccagataggttatccctatcggagacagtgtctgacgggcagtttgactggggcggtcgcctcctaaaaggtaacggaggcgcccaaaggttccctcagaatggttggaaatcattcgcagagtgtaaaggtataagggagcttgactgcgagagctacaactcgagcagggacgaaagtcgggcttagtgatccggtggttccgcatggaagggccatcgctcaacggataaaagctaccctggggataacaggcttatctcccccaagagttcacatcgacggggaggtttggcacctcgatgtcggctcgtcgcatcctggggctgtagtcggtcccaagggttgggctgttcgcccattaaagcggcacgcgagctgggttcagaacgtcgtgagacagttcggtccctatccgtcgcgggcgtaggaaatttgagaggatctgctcctagtacgagaggaccagagtggacttaccgctggtgtaccagttgttctgccaagagcatcgctgggtagctatgtagggaagggataaacgctgaaagcatctaagtgtgaagcccacctcaagatgagatttcccatgattttatatcagtaagagccctgagagatgatcaggttgataggttagaagtggaagtgtggtgacacatgtagcggactaatactaatagctcgaggacttatccaaagaaagtaactgagacatattgacaacgatttggtttcttgatacagtatagatattcaattttgagttgagaatactcagagttaagtgacgatagcctaggagatacacctgttcccatgccgaacacagaagttaagccctagtacgcctgatgtagttgggggttgccccctgttagatatggtagtcgcttagcgtttatccgccatagctcagttggtagtagcgcatgactgttaatcatgatgtcgtaggttcgagtcctactggcggagtataggtttcattgctggacgttggtctagctttttttgtttttatcaccttttatagtgacatatatgtcgctattttatttcttatttatctcttataataggtctcgtaattaatttaattacaaaaattatatctattaataggaggttgaatggaacaagaagtttttgttcacgcatatgaggttgttaggccgattgtacttaaggctagtcgacaatatttcatccaactttgggaccaagctgatatggagcaagaagctatgatgacgctttatcagcttttagaaaagtttcctgaattaaagtctgatgatgataagttacggcgttattttaaaacgaaatttaggaatagacttaatgatgaggttagaaggcaggagtctgtaaaacgacaagccaatagacaatgttatattgaaatttcagatattgctttttgtcttccgaataaagagttagatgctgttgataggcttgtttatgatgagcagcttaatgctttccgtaatcagttgtcttcggaagatgctactaagttagaccgtttgctagctggggagtgttttagaggtcgaaaaaagatgattcgagagttaaaattttggatggttgattttgatccttacaatgaagatgattaatccttaatatagaaccttgactggcaatattatttaatatgaataaaaaacacttcgaaagtagattcatcttatctatcttttgaagtgttttttatgtaatgaatttattttactgctatagggtttccaataaatcttggaagttcaatattttctttgattagagcttcttggtaaagttttaagaagtctgcatagatatgagtttgttgtccattttttgtaaagatatcaatacgaaataccagttgtccagaaggagttgtgcttaatccaatgatatttggtgctccacagatttgaggatagttttcaatgttttcttgatttacttcttggatgatgcttgtcaccttattgatatcggttgacggatagactgggatatcaatttgagctctcatgtctcctcgagatttgttggatacaattgtgatatttctgttaggtataaaatgaagagtaccatcaaatcctcgaatttgagtagtgcgaatacctacggttgaaacaaggcctgtaacgggtcctacttcaactgagtcgccgacttcaaactggttttctaacaagatgaaaaaaccattaacgacatctgataggaagccttgagctcctagaccaagagcaactccagcaagtcctgcaccagcaaggaggctagatactggaaccccaaggatactaagaagccagtaaacaaggaaaaagtatagcacgtagttcatgcaattgtgtagtaaacgttcaatggttttttgtcgagcaggtgtttgaattgtccaagctagagagcgtccgactgtatgtttaaaaaggaagttgataatcttcttactaagaagaaagatgatgagaagaatgaggagcttaatcccttttgtaatgagtaccattagggtctcttcaaaattaaattgttggatgtatctttgtaaaatattcatagctttagtttatcaaaaatttgaaaaagtagcagttcctaacgattttcttgtgattaaattggagaaaaaaacttttaaaaggctttgaaatatggtaaactaaactgtatctataaaaaattttaaggagaatgactacatgtctgtatcatttgaaaacacagccactaaccgtggtgtggtgacattcactatcggtcaagataaaattcaaccagctttagatcaagcgtttaacaaggttaaaaagaatttgaacgctccaggcttccgtaaaggacacatgcctcgtgccgtatttaaccaaaaatttggtgaagaagctctttacgatgatgctttgaatgcaattcttccagcagcttatgaagcagcgattgctgaacttggtcttgatgttgttgcacaaccaaaaattgatgtaaaatcaattgaaaaaggtcaagattggacacttactgcagaagttgttacaaaacctgaagtaaaacttggtgcatataaagatcttgaagtttcagttgaagcttctaaagaagttactgatgaagaagttgatgctaagcttgaaaacgaacgcaaaaacttggctgaattggtcgttaaagaaggtgcagctgaaaatggcgacactgttgttatcgactttgttggttcagtagatggtgttgaattcgacggtggtaaaggtgaaaaccactctcttgaacttggttcaggtcaatttatcccaggattcgaagaccaattggttggagcaaaagctggtgatgaagtagaagttaaagtaactttcccagaagactatcaagctactgatcttgcaggtaaagctgctgtatttgttactaaagttaacgaagttaaagctaaagaagttcctgctcttgatgatgagttggctaaagatcttgacgatgaagttgaaactcttgatgagttgaaagctaaataccgtaaagaacttgaagcagctaaagaaatcgcatatgatgacgctgttgaaggtgctgcacttgatttggctgttgaaaacgctgaaatcgttgaattgccagcagaaatggttgaagacgaagttcaccgtgctatgaacgaattcatgggtaacatgcaacgtcaaggtatctctcctgaaatgtacttccaaatcactggtacaactcaagaagatcttcacaaacaatatgaagctgacgctgacaaacgtgtgaaaactaaccttgttatcgaagctgttgctgctgctgaaggattcgacgctacagaagaagaaatccaaaaagaaatcaatgatcttgcagctgagtacaacatggaagtatcacaagtttctgcacttctttcacctgaaatgcttaaacacgatatcactatgaagaaagctgttgaagttatcacaagcacagcaaaagttaaataatatgactaaaatcaagtttctgttgagacttgattttttcttctataaatgctttgactattgactctttttagcgtaaaataaaaggtagcgaaaaattgattgctgagctatttctgatagaaactagcttgagtaagaatgaaggagaaccactttggaactagacgtatttgctggacaagaaaaaagtgaattatcaatgattgaagtggcccgtgctatcttagaaacacgtggtcgtgataatgaaatgtatttcaatgatttggtcaatgaaattcaaaattacttagaaaaatcggatgctgatatccgcaatgctttgccattcttttattcagatttgaatacggatggaagtttcattccactaggtgataacaaatggggcttgcgttcatggtatgcaattgatgaaatcgatgaagaggtcatcacattggaagatactgatgaaaatgcaccaaaacgtaagaacaagaaagttaatgccttcatggatggtgatgaagatgccatcgattataatgacgatgatccagaagacgaaaacttcacacctgattctgatagtcttgaatatgacgacgatagcgaagatgatgagaaagccgaagtggaatcttatgactctgagttgaatgaaattattccagatgatgatttggatgatgttgagttgtcagaagaagatgatgacgatgactatgaggatgagtcaagcgactaagttttcattgacaaatggtcttggatagtttagactatttatcgggcacctcttttgaagaggtcatgattaaggctcccagagtgaaactcttgggggtcatttttgtttttagtcatttactggacttgtctaaggtgaggtactttgtaccgctcccatcaggtactaggaaagggctgtcgtgattatctgagtgggtaatcaatctactatctgtagttgttttgaattatattataaggagttaacatgacaaaatatattttcgtcactggtggtgtggtatcttcaattggtaaagggattgtagctgcaagtcttggacgtttgcttaagaaccgtggtcttaaggttacgattcaaaaattcgatccttacatcaatattgacccagggacaatgagtccttaccaacacggtgaagtttatgttactgatgatggtgctgaaactgaccttgaccttggtcactacgaacgttttattgatatcaatcttaataaatactctaacgtgactactggtaagatttatagcgaagttttgcgtaaggaacgtaaaggggagtatcttggtgcgactgttcaggtgattccgcatatcacagatgctttgaaagacaagattaagcgtgcagcgacaacgactgattcagatgtcattatcactgaagttggtggtacggttggggatattgaaagtctcccattccttgaagcacttcgtcaaatgaaggctgatgttggttctgagaacgttatgtatatccacacaacgcttcttccttatttgaaggctgctggtgaaatgaagacaaaaccaacgcaacactctgttaaggaattgcgtggtttgggtatccaaccaaatatgttggttattcgtacagaacaacctgctggtcaaggaatcaagaataaattggctcagttctgtgatgttgcacctgaggctgttatcgaatcactcgacgtggaacatatctatcaagtgccacttaatatgcaggctcaaggtatggatcaaatcgtttgtgatcatttgaaactggatgctccagcagcagatatgacagaatggtctgctatggttgataaggtgcttaatcttgagaaaacaactaagattgcccttgttggtaagtatgtggagcttcacgatgcctacttgtcagtggttgaggcacttaaacactctggtttggcaaatgatactgccattgatattgactgggtcaatgctaatgatttgaccgctgaaaatgttgcctctcgtttggctgatgctgatggtatcatcgtgcctggtggtttcggtcaacgtggtactgaaggtaagattcaagctattcgttatgcacgtgaaaatgatgtgccaatgttgggtgtctgtcttggtatgcaattgacatgtattgaatttgctcgtcatgtccttcacttggatggcgctaattcagctgagcttgatccaaacacaaaatatccaattatcgatattatgcgtgatcaaattgacattgaagatatgggtggtactcttcgtctcggtctttacccatgtaagttgaaaccaggttctaaggctgctgcagcttatggcaaccaagaagttgttcaacgtcgtcaccgtcaccgttatgaatttaatactaagttccgtgaacagtttgaggctgagggctttgtattctcaggtgtgtcaccagataatcgtttgatggaagttgtagaactcccagacaagaaattctttgtggcagcacaataccacccagaataccatagccgtccaaaccatgctgaagaactttataatgcctttgtaacagcagcggttgaaaatgctaaataattatctaagacagagtgggggagcctactctgttttttattgtctccttttatgctaaaataaagggaataataagaaagaacgaggaaaacaaatggctaaatttggctttttgtcagtattggaagaagaattggataagcatctagactatgattttgcgatggactgggataaaaaaaatcatgctgtggaagtaacctttatcctagaagcgcaaaacagtggcaatgtggagactattgatgataagggtgaagtgtctgatgaagatgttatttttgaagattacgtgttcttttacaatccagcaaaatcacgttttgatgaagaggactacctagcgacaatcccatatgaacctaagaaaggtctatctcgtgagtttttggcctattttgcggagactttgaatgaggtggcgacagaaggattgagtgacttgatggattttctatctgatgatggacctgaggaatttggtttggtttgggacaaagaagctttcgaaaaagggaaagatcaacttgaagagaaggaattttttgcttatccgaggtattaaagggagcgaaaagggatggatgcttatttaaaagatcagtttgattttacaggtgttaaggctgccttactcgtagagcaaagtattttggtcattctcagagataataaaccagatattccttggccaaatacatgggaattgccaggtggtggaagagaaggtcaagaaacgcctcttgaatgtcttcaacgtgaggtctgggaggagctgggcttgactttgacagaggaatcgattatttggtcgaaaatctatcctagtatgttggataaagataggtcagctgtctttgtggttggccgaattagccaagagcagtatcgtgagattcgttttggtgacgaggggcaggaatttaaactaatgcctgtagaggactttataaaagcagaaggtgtcattccccagttgcaggaacgctttaaagactatttatcagaaaaggaagaaaataatatatggacaaatggcaagaactaacgattgaggttaatcgtgaggtcgaagaggtggcttctaatattttaattgaatctggaagccagggtgtggctattgatgatagtgcagattatttggaaaatgcggaccgttttggtgagctttatcctgaggttgaacaggttgagacggttaaaattacggcttactatccggagtcagcagatatcgaagctattactaagcaggttaatgagcgtttggctgagttgacggattttggtcttgaaactggagatattcacttggctactcaagaattggttgaagaagactgggctgagaattggaagaagtactatgaaccagctcgcattacccacgatttgactatcgtaccgtcatggacggattatgaggcatcagtaggtgagaagattatcaagctagatcctggcatggcctttgggacaggaacacacccgacaactaagatgagtctttttgcactcgaacaggtgcttcgtggtggcgagactgtgattgatgtgggaactggttcgggtgtcctctcgattgctagctctcttcttggagctaaggaaatctatgcctatgaccttgacgatgtggcggttcgagtgacacaggaaaacattgatatgaatcctggcatggaaaatatccacgttgctgcaggtgaccttttgaagggtgtaactcaagaagctgatgttatcgtggctaatattttggcggatattctcatccatctgacggaagatgcctaccgtttggttaaggatgaaggttatttgattatgtcagggattatctctgaaaaatgggatatggtgcgtgaatcggctgagaaagctggtttcttcctagaaactcacatggttcagggagagtggaatgcttgtgtcttcaagaagacagatgatatttcaggtgtgattggaggctaaatgcaacagtattttataaaagggcaggttgaaaatccagtaatcatcaaagacaaggatactgtgaagcatatgtttaacgttatgcgtttaacagaggatgatcaggttgtcttggtttttgaagacggtatcaagcgtcttgcgcgtgtgactgaccgtgagaatcatatctttgaagtgattgaagacttaaatgataatgttgagatgcctgtatctgtaaccattgcctctggctttcccaagggagataagctggatctggtgacacaaaaggcaacagagcttggagctcaggctatctgggccttccctgccgactggtctgtggtcaagtgggatggtaagaagcttgccaagaaagaagataaacttgccaagattgctctaggagctgcagaacaatccaagcgtaatcgtgttccagaagttagattgttcgagaagaagggagaatttctatcagaattagataattttgataagatttttatcgcctatgaggaaacagccaaagcaggcgagttggctactctagctcgtgagttggctaaggtagagagtggtcagaaaattctctttatctttggaccagaaggtggtatttctccgtctgagattgatgcatttgaagaagctggtggccttaaaattggccttggaccgcgtattatgcggacggaaacggctcctctctacgctttgagtagtgtcagttatgccctagaattgaataaataagagaaagttggccttgttccaactttttttgtatttgacacttttaagctaagattgcatcttgccattggttttgtatgacaaatcgagtaattctaaaaaagttgataatcttatttagttttaatataattgtattatctttataaaaggggaagatttttaatgaaaacgaatcgttatgtgactcaatccgctgtggttttgggcctttttgctctcttgactgtgccacaagtcgtagggcaagctgatgaagcaacggcacctgtatcaactacttctaccgaaaccgtggcagatagtggtgcatcagtagtatcaggacaaggaacttctgggacagctgttcaaggaggaacagagactgtctctgctacaccaacaacagtagcgacaaatgcgtctgcagagccatcagctaatacctcaacgacccaagcaagtcaagaagccagtgctgttttgacgaatgccaatcaggtgacaccagcagtgccagtacaggccgaaactgtaacagagcctgctcatgaggggcagaccgttgatatgcagattttgtcaacaacagaccttcataccaacttggttaactatgattattatcaagataagccgtctcaaacagttggtttgtctaaaactgctgtccttatcaaaaaagcccgtgaaactaatccaaatacagtcttagtggacagtggggatacgattcagggaactccttttgggacttataaggctttgattgatcctgttgcccaaggtgagactcaccctatgtataaggcttttgagatgcttggttatgatgccgaaacgcttggaaaccacgagtttaactatggtctagaatttttggatcgtatggttaaggctgctaagattaacattatcaatgctaatgtgcgtaatgctcagaccggtgattactattacaacccttataagattgttaacaagacctttactgatacggacggcaaacaggtaacactaaaaatcggtattactggtgtccttccaacacagattttggtttgggataaggccaaccttgaaggtaaggtaaccgttgatgatccaatggaggctgttaaggctatcgttcctaagatgaaggctgcaggagctgactatattcttgttgctgctcactctggtattggtgacaatgaatatactaagaacgaagaaaatgaaggttaccaaattgctggtatcgaaggtgttgatgctgttgcgacagggcattcccacgcggatttcccaaatggagatggcacaagtttttatgcgaaatatcctggtgtagatgatgtcaatggtctcatcaatgggaaacctgtggttatggctggtaaattcggggatcatctaggtatcatggatgtcaaattgacttacacggatggtaaatggaaagttgtcaatagtaaggccaagcttgaaaagattgatactaagtcagatgttgcggacaaggacttaattgatatggctgctcatgaccataatggaacaatcaactatgtccgtaaggaagttggtgagaccacggctccaatcactagctactttgctcaggttcaggatgatccatctattcaaatcgttaataatgcacaactatggtatgctaaaaaacaagtagcgggaacagcagatgaaaatcttccactcctctcagcagctgcacctttcaaggcagggactcgtggggatgcgacctactataccgatatcccagctggtccattggccattaagaacgtcgcggacctctacctctacgacaatgttactgccctactcaaagtgactggggcacaaattaaagaatggttggaaatgtctgcaggacagttcaatcaaattgatcctaacagcaaagaaccacaacaactcattaacagtagctatcgctcatacaattacgatgtgattgatgggttgacttataagtttgatttgacacaacctaacaaatacgatcgcgaaggtaagttggttaacccagatgctagccgtgttcgtgacttggcttatcaagggaaacctattgatttgaatcagactttccttgtcgtgactaacaactatcgtgcgactggtaacttccctggtgttaaagatgctgcagaaaaacgtcccctcaatcttgagaatcgtcaggccatcattgactatattgtcagcgagaaaacgattaatccgagtgccgatggaaattggagtttcgtccctaatatcacgaatgcagatatccgttttgcctcatctgataatgcgcgtgcccaccttgctggtcaggatgccattagttatgtaggaccatcaacacaagcaggatttgcagagtatcgtttggttgttaaggaaaaggcaaatcaagttgaggatacgactaataaagaatctgagaagtcaccaaaaggtgttgagacgacagatcaaactaagcgtgagacaccaaaagctactgtaggtgccagcgtggctaaacctgttccagctatccagttgtcaaacgctcaagtcgttatcttgcctcaagctcaagtacaagaaactcaaggttcaagttcagataagaccttgccaaacactggttcagacgaatctgtgtcagcaactttagctggtctggttcttatgaccttggctggattctttggaatcaaaaaacacgaaaaaaattaagcaaaggaaaatcctctatcagggcttttttgctatagttttagcgttggttaaagttcttttgtgcttctaggataataggtgccagacgttctatatcggactgtgtaccgcgtagctcgaagtctcccaacattgggaaaccaaaacgttgactgtactgtttggcggttaggcagtactggttattgaagttacggttaccagaaccgatgataccaaagcaacgttcatgattgtcatgggctgcgataaagtcacccagtggattggttaggatctcaacatctccattgtcaacgccatttcctccttcaaggtaggttggcaagagtgcgacaaagggttcatctacttggaaggtttcatgattaagttctttaatattgatttggcgacattcaatcccgtggttgagggacagatagtcagacatacgtttgacaaagctttgggtattaccgcttagactaatataaacgagggtaagttgagacataagcgtcctctttctatctatatcttgtgtttgttcaatcattctaacacaagatattgtgcttttcaagttagctccttgcggttaagaattgcctatctagctctttttctttacttgtaaaagtgataaaataaaggttattaaaagaagcgaaggaagaaatcatggctaaagataaaaatgtaacaggagaagaaattttagacatttgctcggcctacatgtcagcagatgatttgaaattagttgaaaaagcctggcattatgcgacagatgctcatagtgggcaatctcgtcagtcaggagaaccttatattattcaccctattcaagtggcaggtatcctggcagatctccatcttgatgcagtgacagtagcctgtggtttcttacacgatgtcgttgaagacaccgaaaaaacgcttgatgatttggaagcggattttggtacggatgtacgaaatatcgtggacggtgttactaagcttggtaaggttgagtacaagtcccacgaggagcagttggctgaaaatcaccgtaagatgcttatggccatgtctaaggatatccgtgtcatcttggttaaattggccgaccgtttgcacaatatgcgtacccttaagcatcttcgtaaggataagcaagagcgcatttctcgtgaaaccttggaaatctatgctcctttggcccaccgtttaggtattagtcgtatcaaatgggaattggaagatatgtccttccgttaccttaatgaggtggaattctacaagatttctcacatgatgaaggaaaaacgtcgtgagcgtgaggaactcgtggacgagattgtcgataaaattaagacctatacagctgaacaaggacttgttggtgatgtgtatggtcgtccaaagcatatttactctatttaccgtaagatgcgcgacaagaaaaagcgctttgatcaaatttatgatttgattgccatccgttgtgtcatggagacgcatagtgatgtttacgccatgttgggatacatccatgaactctggcgtccgatgcctggccgttttaaagactatattgccaatcctaaatccaatggttaccagtctatccatacaacggtttatgggccaaaaggacctattgaaatccaaatccgtaccaaggaaatgcaccaagttgccgaatacggggttgcagctcactgggcttacaagaaaggtatcaagggcaaggtagattcgaaagagtctgctttgggaatgaactggattaaagatcttgttgaacttcaagacgcctcaaatggtgatgctatggggtttgttgactctgttaaagaggatatcttctcggagcgtatttatgtctttacgccaaatggtgctgttcaggaactgcctaaagattcaggacctattgactttgcctatgccatccatacccaagttggtgagaaggccacaggtgctaaggttaatggccgtatggtgcccttgacagccaaactcaagacaggtgatgtggttgagattgtaactaatgccaattcctttggtcctagccgtgactggattaagatggttaagaccaccaaggccagaaataaaattcgtcaattctttaaaaatcaggacaaggaagcctctatcaccaagggtcgtgagcttttgattgcctacttccaagagcatggctatgttgccaataagtacctagacaagaaacatattgaggaaattctccctcgtatgagtgtgcgtagtgaagaagctctctatgccgctgttggttttggtgaaattagtgctgctgctgttttcaatcgtttgacagaaaaagaacgccgtgaggaagagcgtgcgaaggcaaaagctgaagctgaagagctaatgaacggtggcgaagttaagactgagaagaaagaagttctcaaggttaagagtgaaaatggtgtcatcattcaaggtgcttcaggtctcctcatgcgtatcgctaagtgctgtaacccagtacctggagatgagattgaaggttatatcaccaagggccgtggaattgctattcaccgttccgattgtaataatatcaagagtcaagaaggttatgagcaacgtctaatcgaagtggagtgggatgaacgtaatgccaataaatcttatttggcagagattgacatctatggccttaaccgttctggtctgttgaatgatgttcttcaaatcttgtcaaatacgaccaagagtattgctacggttaatgcacaaccgactaaggacatgaagtttgccaatattcacgttagctttgaaattgcaaaccttattgaattgactggtcttgtggataagattaaaattattcctgacgtttacagtgttaaacgtacgaatgggtaaggagttactgcgatgaagattgtaattcagcgtgttcaaagtgcctctgtagttattgaggattgtacggttggcgctattaagcaggggctcttactattggtcggagttggtcccgaggacaccaaagaggacctagagtatgcagttcgtaagattgtcaatatgcgcattttttcagatgaagatggcaagatgaatctttctgttagggatattggcggccagattttgtcgatttctcagtttacgctttttgcagatacgaaaaaagggaatcgaccagcatttacaggtgctgcaaagcctgacatggctagccagctctatgacgatttcaaccaatccttgtcaactcatgttcctgtagaaagaggacgctttggcgcagatatgcaggttagtctggtcaatgacggacctgtgaccattattttagataccaaaaatcaataaacaaaccatttttcgccttgtgtgagaggtggtttttttattctctcacatgaactatttaggtgatggattttcattatttgggatttatttttgtcattttaagtagactgaatcaagtgaatatttaatgaaattagaaaatgttgttctcaaatttctgaaaaaacctgaccattcatgatgaaaaaattaccgtttacgaggattaccggaaattcccttgtcttacaaaaaagattaagttaacattagtttcataagaaacaccaagcgatttttatgaaactaaaaataactcgagtttacagcatgcaaatacaaatagtgataatttgaaacgccgaggtgatttaaacttttttagagggatagagagatatgtcaaagaaagtagcgtcaactaaattattatcaggtttgtttgtagccggtggtgtcctagggatgaatcaggtcgccaaggcagataacgtggtcagttcagaagcaacaaaaccagttattacaactgaagcagatgacttggtggtggtaccaactgaggccgttactccagtagcgacaacagaagtaggcccatcatctgctgctgttacgacagatactgcaacaacagcgacagcttctacaatcttttcacaagctgtaccagcagagagcgctagctcagaaacgcttgtagccagtgaagcactagctcctgagtcatctgctgtggaaaccatcacatcatcatctgataatgctactgaagcaggacgccattcaactgctcaagtaacaccagttacagaagtgacagagcaaaacttgaatggtgatgcctacttgacagatccagaaacaacaaaagcagcctatagcaagacagatggtgatattaattattccgttgttgtgtctaatccaacagcagaaactaagacgatgactgtcaacttgacacttcaacatgcttcagaaatcatcggtcaagataacgttgaccttacgctagcggcaggagcttcagctaaggtttcaaacttgacagtagcgtcagagtggttgacaaacaatacaggttacttggtgacaatcagtgtcaacgataaatcaggtagtactttgtcaagcaagcgtgctggcttgtctgttgaagatgattggacagttttcccacgttacggtatcgtagcaggttcgccaactgatcaaaacagtattcttgttaaaaatcttgaagcctaccgtaaagagcttgagctcatgaagtctatgaatattaactcatatttcttctatgatgcttataatgaagctacagatcctttcccagaaggtgtcgatagctttgttcaaaaatggaatacctggagtcatactcaggttgacactaaggctgttaaagaattggttgaccaagttcataagtcaggtgctgttgccatgctttataacatgatttcagcagattcaaatccaaagaatccagcacttccacttgctgctttggcttataacttctacgatagctttggtaagaagggtgaaccgatgacttacactatcggtgataacccaactcaagtttactatgatccagcgaatccagattggcaaaaatacatcgcaggtgtcatgaaatcagctatggatcgtatgggattcgatggttggcaaggtgatacaattggtgacaaccgtgtgactgattatgagcaccgtaacagcacagacgaggctgactcacacatgatgtctgattcatatgcgtcatttattaatgccatgaaggacctcatcggtgaaaagtactacatcacaatcaatgatgttaatggtggtaatgatgataaactagtcaaggcacgtcaagatgttgtttataatgagctttggacaaacggtggttcagttattccaggacgtatgcaggttgcctatggtgatttgaaagcacgtatcgatatggtacgcaataaaactggtaaatcacttatcgttggtgcctacatggaagaaccagggattgactatactgttcctggcggaaaagcaactaacggtgctggtaaagatgcccttgctggtaaaccattgcaagctgacgcgacacttctcgtagatgcgacagtagctgcagccggtggctatcacatgtccattgcagcccttgccaatgctaatgcagcccttaacgttcttcaaagtgcctattacccaacgcaatacctcagtgtagctaaggacactattcgtaagctttacaattaccaacagtttatcactgcttatgaaaatcttctccgtggtgagggtgtgactaacagcactcagtctgtatctaccaagaatgcggctggtgaaatcctttctaaggatgctctaggtgtaacaggagatcaagtttggacatttgctaaatcaggaaaaggtttctcaactgttcaaatgattaacatgatgggcatcaatgcgggctggcataatgaagagggttatgcggacaataaaacaccggacgcacaagaaaatctcacagttcgtcttagcctagcaggtaaaacagctcaagaagctgctaaaattgccaatcaagtctatgtgacgtcaccagatgattgggcaacttcaaacatgaagaaggcacaagcaagtcttgaaacagatgaaaatggtcaaccagtgcttgtcatttcagttcctaaactaactctttggaacatgctctatatcaaggaagacacaacagcaacaccggtagaaccagttatcttgaaaccagttactaaccaagctggtaagaaagtagataataccgtaacatctgaagcaagctcagaaacagctaaatcagaaaatacaacagtaaacaaagattcagagtctccaactgataagaaaccatctgttgaagctcctaaactcgatgaaacaactaaaccagcaccatcagttgacgagttggtaaactcagcagctgttccagtggcgatagctgtgtcagagaccgcacatgataagaaagatgacaactcagtatctaagacgacagcaatttcagaatcacatgcagtagttgaaccagtggcttctttgacagaatcagaaagtcaggcaagcactagccttgtttcagaaactacaagcacaattgtctcagttgctccgtcagaagtctcagaaagcacaacagtatcatcgaaggtctcagaaactgatattatctcagaagcatcaacttcagagacttcagcatctgaatcagagaattcaatcagcacagtcgtttcagaatcagaagtagttgaagaaccagctgtttcattgacagaatcagaaagtcaagtgagcacttcagaagtgacttcggcgatttcagaaacagtaagcacatcagaggaagtcgtccttgatggactatcagaaaacatcaatagttggaatagactctctgtagctcctcgcgtctcagaaaccttaccaagtacttctgaaacgattacagaagcagcatcactctttagcaactatgcaagatattcagaaacagcaagctcagaatctcactctatggtagtagcttcttcagaagcctctattgaaaaattagcagtatctatcttgaaagatactgagggtggcttgtacgatgcaacaacaatcagaaatattgttgagatgattgatagcattacaacaaatgtcagctatactcgcagtagccgtcaagaccttgtcaatacagtttcgtcagataacacttacaatggtagtcaagatcttaaccttgcaagtaagacaacgacgcaagcaggtgaaaaaggaacaactgaagatcttaaggctacaattgctaaaacagcaaaatctcacaagtggggagaacacgctgtagctatccttacagctattgtccttgcaggtgcggcaacccttgcagctcttcgtaacttcttgatgtcaaaaaaagttgataaataataagtagaactctttgtgtaaacaaggagttttctttatactggctgctattttttctgaaaattgtgatacaatagaaatagtttgaatattgtgtcaaaggagagccaatgattactgcaaatgatatcgtaaaggctaatgaagtcttaaaaaacgtggtggaacgcacaccactagattttgatcgctacttatctgaaaaatacggggcgaccatttatattaaaaaagaaaatatgcaaaaggtacgctctttcaaattgcgaggagcctactatgctattcatcaattgagtgatgaggataaggcgcgtggtgtggtttgtgcatcagccggaaaccatgctcagggggttgcctacacttgtaacgagatgaagattccggcaaccatctttatgccagtaacaacgcctctccaaaaaattggtcaagtccgtttctttggtggcaagtttgtaacaatcaaattggtgggagatacctttgatgcttctgctcaagcagcacaggaatataccaagtctgaaggcatgactttcattgatccattcgacgattataatgtccaagcgggtcaaggaacagttgcttatgaaatttatgagcaggctcaagaggagggtgtttccttcgatagtatcttggttccagtaggtggcggaggccttatctctggtgtggctacttatatcaaggatgtggcaccatctatggaagttattggtgttgaggctagtggtgctcgtagtatgcgtgctgcctttgaccgtggttatcctataaaactcgaagaaattgataagtttgcggatgggattgctgttcaaaaggtaggtgtcaagacctatgaagttgcacgtaaatatgttgaccgtctcttgggagttgatgaaggcttgatttcagaaaccttaattgatatgtactctaaggttggtaccattgcagaacccgcaggtgcggcatcagtggcagctttggaagtgatcaaagatgagattaaaggaaaaaccatcgtctgcatcatttcaggtggtaacaatgacatcaaccgtatgccagagatggaagaacgtgcgcttatctacgatggtatcaagcattactttgtggttaacttcccacaacgtcctggtgcccttcgtgaatttgtaaatgatatcttgggaccaaatgatgatatcactcgttttgagtacatcaaacgtgctaataaaggaaaaggtccggttctcattggtatagctcttagtgataagaacgactatgatggacttctcgagcgtctttcggcctttgacccaagttatatcaaccttcacggtaacgaaacactatacaatatgcttgtctgaggacaggttcagacaatgaaaaaagaatcgacgaagtcggttcttttctactttgacttagctataaagtggtactaatgccttatcttcaaactaaaaccccagtatttctactgaggttttctttattcgataattaagagtccatctttaatagcgaatggattgtctttattgatgcggtcgtagaacatgataccgttagtatggtcgatttcatgttgaacaacgattgagttgtaaccacggagtttaacacgttgcttttcgccctctttgttgaagtattcaacagttacacgagcatgacgaaccacgtaaccaggaacgtcgcggtcaactgagaggcatccttcgccatcgcccaaagcagcatcctgaacagaatgggcaactactttagggttgtacatgatttcttgaaggctatatgcttcttttggtggattaccttcagcgtcttcagggtttggaacgagaacagcgataatgcgttttgaaatatctaattgaggggctgcaagaccgactcccccacgaagccccattttttcggcaataacaggatcttgtgagttacgaagaaactgcatcattttttcgcctaggataatgtcttcgtctgatagtgggaaggttacatcttcagcgacagcacgcaaggttggatttccttcgcgaatgatatcattcatatcaatcatatggctggcgcggataattttggtttgagcgtccatttgtttacctctattttctttgatttacttgtttataactatagcacaaaagggttgaaaattaaaccatcaaggattaaagtgaggctttttctaatcgataaaagccagtttttccaaggtttgtctctctaaaatacgataggttttaaaggcctctttttcgataattccctggtcgataaattgtttgatgactcgctgtacatgacgatagctagttccaaaacgggaagctaaaatagatggcgataattgaaagatattctcttcttcactattcaaaatatgggtggccagacgctctttgacagagtagctcgcattcgttgaagcagtgataccttgcttatgcagtgccatagccaggttacgtccaatttggtagagaaaaacagggtctttgaggagttcttctttattatttaatgggagctgaactgcttgaacctcttctaaagcaatgactgatgatcctgctggttggttggtcatgagttctacatctcccaatatctgaggctgattgagcgtttctaggatatgttctttaccattgaagagagaacgaacaatttttacctttcctgataaaatgtaggtcagctcagtgatagcttgcccttgggtacaaatataatcgttcttttgaaaggtgactttctgtaattggttgaggtaggggggtggaaagacctggtcaagttgaggtcttatggtatgattacgcatacatctccttttttaggacctaggtcctattttttaaagtctccttagattataatgaaaaaataactattagacaagtaaggaaaggatgttcttatccctatattatgacacgaattttagaaaaaatgagcctgcttgggctatccttgctcttgatttcggccttttcgatttcaacagcgttaccacctatgttggactactatagcccaaccttttctgccgcgcaagtggagcttttagtatctgtcccttcattttccgtagtcgcgatgctcttacttaattcatttattgacaaatggctaagtgatagacagctaattgtgactgggctgctcttacttagtagtgctgggatttttcctttttttgtacaagcctatcctcttgtcttactgtcacgtattgcttttggaatggggattggtcttatcaatgctaaggcgattgccatcatcagtcaacgttatcaaggtaaagagcgagttcagatgttaggtattcgtggctccatggagttgattggtggagcttcttgttctcttttagttggacaattactgaaaattcattggacctttgcctttcttatctatggttttggttttgtgattttgattatgtacctcctttttgtgccatcgatggagcaggtggagaagaagcagattacaaaaagaaaacaagttctgaacaaaaaagaccttggtatgattcttggcatggctcttttagcaggttttgtcatctgtatcaattcttcgattagtttgcgcgtgcctctgtttcaagttgctggtaagactattgagagtggtcaatcagccttagtactgagtttagagcagggaattggaattgtagctggactgagtttcgcctcgcttataggacattttaaaaatcgtcttttgcttatagtgatgttcttgttagcggtttgtctctttgggatgtcagtggctagtaacttaccgattttgattttatcttcagttggtgttggtttcttttatagtattattttgacaattatctttaaccgactttctgagtctattgctagaaatctgttgaacaaggcgacggcctatgtcctcttagggtgtaacctagggtcagccctttccccttatgttttgaaattattggcactcatatctccaagttttagttggatttttctagcctatgctacagtaagtttcctacttttccttgggttcttgatgaattcaagaatgactaaaaaagtctaagcttcaaaaacttaatcagtgaaatcttgcgattgacaaagattagtagatgagctaaaatagagaggtcgtaaagacaaaccaactctttcttggttttaggagagccaatcctaagactcggatggagcaaaaaaaggagaaaaaacatggcaatctcaaaagagaaaaaaaatgaaatcattgctcaatacgcacgtcacgaaggtgacactggttcagtagaggttcaagttgctgtccttacttgggaaatcaaccaccttaacgaacacattaaacaacacaaaaaagaccacgctacttaccgtggtttgatgaaaaaaatcggtcaccgtcgtaacttgttggcataccttcgccgcacagacgttaaccgttaccgtgagttgatcagctcactcggacttcgtcgttaattcaagatacaagtgcctaggccttgttcaattgaatacacgaaaatggaactgctctatgatggggcagtttttttattcactaggattttagcccgagttcaaaacagctctctagatgtagagggctgtttttctgcattcctctaaaaatttctgacgatgattaatctatagaacaaacaaaaaaactcccaaattaattctggaagttttttaacttaaaatctttttgataactgtttgaaattgagggagttgatggatagcagttccgacaaggatacctaacatatttaaggtgatatctcccaaatcaaagactcctaaatgtccgaagtattgaatggattcgacggagaaaagggtaaggagacagagtaggagattactcaatcgtgaagaaaagaggagtcccagagggatgaacattaacaggttcatgatgggaacgaagtggctaccccaatataattcccgagcgaaggaaagggggttaagtgatagaccctgggtaccaatgtttttcaagaaaagtaggtagaagagagcaagaaagtaaatgaagtagagtaggagtagtgtctgttttttcagctttctagtaagaaggagtttcaaaaaagcgtagacaaagtaactcagtaggacaataatgactatgttgagtaagacttgaaagtaggagccataatgggcgatgtaatgaacgtactgttcgagatgccccctataaaaccaataagacaaggccagtgagaggattcctagtaagatgttactcaatgtttttaatgtttttgccactttgctcctccatttgcatatgatgagtacacattatatcaaaaaaacgtttaaagaaagttaagaaactgtaacgaagttttgatagaataaaaggataaggcagaatcaaagactaaaaaaggactttgaaacagcaactctacttttgactaacaatttaatgatttttgtaaacaggctatgaaagcttataaaataattaaattttaaaaattaggagtcagcatcttgtttcaagattattaaaatgttattatatagtagtgaatttttaacataaaaaggagttcgtcttatgaataaaaaggttttggcgacagccggaattgcagcacttgcagtttctgctacagttgctaaagctgatgaggtaacgacaaacgatcaagcctcaacaacagcatcagtatcatcgacagctacacaagctgtcccaactcaagcccaagtcgaagcggctagagaacaagccagcgctgcaaatcaagcagtatcgcaacaagagtcagtagttgctaatcatgaagcagctgccaaccaggctcaagcaaacctagcgacagcagatgctaacttgcaaaaggcacaaacagcagccgatgaagcaagtccagaaactattgctgccgctcaaggtcaagtaactactgctgaaaatgcagctaaggaagctaagtcagcagtcgaaacagctcaatcagcagaaaaaactgctaaagatgcagcagacaaacagcaagctgtcgttaatacagatcaagctaatgtcaatgctaaggctagtgaagttgctaatgctcaaaaatcagtagatgccgctaaagcagcctttaatggttctagcgcttctgaggcagcttcaaaccaagctaaagcacaatcagcttttgatgctgcaacagcagctgagaaaaaagctcaagaagaattggcagccgctcaggcagctgataaagaaaaagctactgctatttcagctaaagaagggcaattgactgcagaccaaaatgcagcaaaccaagctaaagcagcttatgagactgctcaaacagtagctaatgaaaaggcagctgctcttgcagccgctgaagcagctaagaaaaaagcagaatcttcaacaacttcaacagctaatgttcgtcaaaaattctcagtttcacaagaatatgtcaatgctcttaagattcatgagtctaaaacagcgaccgcagcagaaaaagctcaagctgaacaagtcttgaagaacgttaataaacgtgatcgtggtaacaatagttatcaagataatgaagcggataaaaatgttaaaattagtgatttgaataaccttagtgaagctcaaattacagatttgtcattgtatgcttcaagtttgattaaccaaattcgtacagcctttggtacaactcaaacatctgtttcaaaaggtagtgttcttgcggctgaccgtgtttcagacggttatgtagcagataactggggttgggaagctattacccatcaacgacatgatagtgccgcccttgaccgtgctggtaagtcatttaatagtgtaagtattggtgaaaaccttaatacatggcaaggtttgacaggaccatttactcttaacgacattaagaaatatgtctatgaagctatgcttgacttcatgtttaacggtaatgagtggaaccatgctcgttctatctctggacttacagcagatggtggtgagtcttacattggaacagacatcagtgatgttgccggtgcctttaacgttcacgtaaacaatgtcaataaaaattctatcgcttctgatagtagctttgacacaactaagattgctaacccatatgaaggtaaccaatctcaatcatcttcaaatgcaaatcttgctgctgcaaaagcagcttatgaagctgctaagcaagctaacgatcaagctcaaagtgatttggctagcaagaaagcggcttctgagtcagcaactcttaagcttaagaatactcagtcagaacttgcagctcttaaagcgactgcaagcaagttggcagctgctcagaataacctttctgaaaaacaagcagcccttgcaactgctaaatcagaattggaaaaagctaacgctgcagttgaaaaccttaatgctaacgcacaagaaaaagcagcagcccttagcaaagctaaagcaactcttgatgaaaaacaagcagagcttcaaacagctaaagataaacttgcgacaagttctgcaaccttgcaacgtttgacaaatgcctacaacgctgctaagcaagatactgctaagaaacaagtagcattgacacaagctaaccaagctttgactgctgctaagaaccgtctagcagcccttacaaatgcttcaggtaacctagctaaggctaaagcagaacgtgcaacagcctttgccaaatttactgcggcgaaagcagctctttcaactgaacgtgcgaaacttgttgaattgtcagctaagcgtgataaattaacgagcgaatacacgactgttcaaacagccttcgataactacatgaaagctaaggcagacaaagagcgtcaaacacaattggataaagagttcgctaacattacatctaaaggtcttacaccagtacctgtttacgatgtagatgggaaagttattgctttcacaacacaagaacaggcagctcaaactgtagcgcaagttcctgtaaattatggtcaaacaaaagctgagaaacaagctcctgtacaagaatcagacagcttgccagaaacaggtgagtcagctgcagttggattcactcttgtaggtctctttatgacactattggccttccttggttttgttgacagacgtacacgtcgtaactaatcattatagacaaaaaaacggcaactgccgttttttttatatgtctgagaatctaaaaaagttaaggccgaaaccttaacttttttgtttttaacccaagaaacgtttgaggaattccttggtacgttcttctttaggattttcaaagatttgttctgggctaccttgttcagcgattacccctttatccatgaagatgacacggtctgaaacgtcacgtgcgaactccatttcatgggtaacgataatcatggtcaaaccagttccagatagctcctgcatagtcttgagtacttccccgaccatttctgggtcaagggctgaagttggctcgtcaaagaggatggcttctggatcaacagagagggcacgggcaatagctacacgttgtttttgtccccctgaaagttgctttggtttagctttccagtattgttctcccataccaactttctccaagttagctttggcgatgctttcagcttctttacggtcacgtttgagaacagttgtttgagctacaatagcattttccaagacattaaggttttcaaagaggttgaaggattggaaaaccataccgagtctttcacgataggtagtgaggtcgtaacctttttcaaggacgttgtccccatgatagaggatttcaccacctgaaggtgattcgagtaggttaatagagcgaaggaaggttgatttccctgaacctgaagaaccaataattgagataacctcaccctttttgacgctgagggagatatctttgaggacttcattttttccgtatgattttttgaggtttttaatttctaaaatcgtctcagtcattagtgaacccctccttgtgtgtaagtatcttgatccaaacggcgttctacataacgcaagatgcgtgtcactgtgaaggtaaggacaaagtagattgctgcgataacaaagaatgtttggaagtattgataagtttggcttgcgacagtgttacctgcgaagtaaagttccacaacagagataacgttcaaaacagaggtatccttgatattgataacgaactcattaccagtagctggcaagatgttacggataacctgtggaagaacaatcttacgcatggtttgagcgtgggtaaatccaagagcagttgcagcttcaaattgtcctttatctacagcgaagataccaccacgaacgatttcactcatgtaggctccggtgttgatagaaacgatgaagacagctgctagggtacggtcaatattgataccaaaggcctgggcagtaccgtagtagataaccatagattgtacaatcattggcgtaccacggaaaacttcgatatagacattaagaacccaaccgaagagtttttggagcaaggctacaaatttattagcagccttaggagctgtgcggtaaacaccaatcataagaccgatgaaagtacctacaactgtaccgataattgagataagaagggtaattcctgtaccacgtaagaattgtggccagttcttagcgatgatagtgctcatctgactaaagaagtttccttttttagcctcatcagtcttatctgcaggttggatgttaatgatgtgatccatcagtttgacacgttcctcttggctgattccagcaaggaccttattgacttgctccatttgttggctgtctcctttgcgaagaccgacggccaaggatacgtcatcatctgaaacctggaaaccaccatctttaagcgtaatcatcttatattttgagctagcttcttcggcagttttggcttcaggacgctctgaaacatagccatcgatgataccagacgcaagggcttggcgcatagcaccgaagtctcccatagcggtttgtttgctgacacctgggatttggtcaatcaaattatagagataaaccccttgttgagctgtgattttagcatccttgaagtctttgaggctcttagcgttggcataatcaccgtctgagctgacaaccatgacaggttcgcttcggtagtagctgtctgaaaagtcgatttcttgacgacgttcagctgttggactcatacctgcgatgatcatatcgatcttgccggaagtgagggcaggaatcaaacctgtccaagcggttttgaccaccaagggtttcttcccttgagcttcagcgatttttttagcgatttgcacgtcataaccgttggcatactgtttagtaccttcgattggaacggctccgtttgagtcatcgtcctgcgtccagttgaaaggtgcataggcagcctccataccgacacggagatactcgtctgcttgagcgcttgatactccgccaaaaacgaggaggagcgctgcaaagcaggctacaataattcttttcattgaaacaatgtctcctataaaaatgtcataccttactattttacaggaaattaggattaatgacaataagttgggattagaaaaacaatctctataccaagattgtcttcaaatacaagttgtaatttgatataatgggaaggacgatttggagccttgatcatttttggtgtgatgaggctagcattttaaaacggagataattatgcaaacggcacaatttattattgaattactaaaagcagtctttcttgggattgtcgaaggtatcactgagtggctaccgatttcatctacaggtcacttgattttggtgaatgaattcttgaacttgagacaaagtaaagatttcatcgatatgtttaatatcgttatccaacttggtgctattcttgcggttatggtcatttactttaaacgtttgaatcccttccaacctggtaagacagcacgtgaagtgcaattgacttggcaactttggctcaaggtggtcattgcctgtattccttcagccttctttggtctacttttagatgactggatggaggctcatctcagtaatttctttgtagtagctattatgttggtggtctacgggattgcctttatttggattgaggaccgcaatcgacgtgtagagcctaaggtaacggatttggcacgtatgtcttacaagacagctttctatattggtcttttccaagtcttgagtatcattccagggacaagccgttcaggtgctactattcttgggggtatcatcgttggtactagtcgtagcgtggctgctgacttcactttcttccttggtattccaaccatgtttggttacagtgggcttaaggcagttaagtacttcattgacggaaatactttgacaggtggacaagtagctattctcttggtagctagtgtgacagcctttgttgtcagcttgttcgtgattcgcttcttgatgaattacattaagaaacatgattttacagttttcggaaaataccgtatcgtgcttggtattattgtgcttctctatggagctgttaaacttatttttggataattacttttaagtaaactgaaaaggacttcaattggagtcctttttatctggttttgaaatcatttgtggataagttttccaaagatgagataagccagcaaccataggaccagtccacaagttaagaagctagctaggattttcaagaagtccacgacattatgcaagggataccatccggacaaacagaggattggaaggatggtaacacacatgatagagaagtggagcagtgattgctgtttgagcgataaacggttatcgtcgtaaatgggagcagttgctagtatgatggcgacaattagcccggtaagaaaggtagatttgtttacttgatgaggttgccccgacaagtagagaaggagcgtcaataaactcgttattcccccagcaatgctagctcgtagccacccttttttgtaggcagtcatggtcatcacctccacgtataggttcacttttattatacaactttctgggggagatgacaggtattaatgggaaaatacaaggttttgttagcattgagaagtttttagaaaccctatcctaaataagacgcaaacttgctcagaaattgctatctcttggcttttctagtataatgaaataactactcgtgcgaggttttttacatatggaaatgaaacaaataagcgagacaactctaaaaatcatgattaccatggaagatcttgaagaacatggtatggaattgaaagatttcttgattccccaggaaaaaacagaggaatttttctacactgtcatggatgagttggacttgcctgataactttaaaaatagcgggatgctgagcttccgtgtcacgccacgcaaggaccgtgtggatgtctttgtgactaaatcagatcttaaggaagaccttgatttcaacgatttgtcggatatggacgactactcagggctttctccagaagagttcctcaaggctcttgaggggaactttatggacaagggggatatcgaagcacaccataagctcgaagagcttgaaaagaccttggaagaggttgataaggctatgacagagcctacaaaggaagtggctgaagaaaatattcgtgaagactatacccactatgtcttggctttctctgactttgatcaagtggtgacctttacgcaaggcttgaaggatgtgccagttgaaggttctgagctttataaacttggggatgtctactatatgacaatccttctttacttggctgatgagcctgattattacgcgaacaatatgtatgcgcgttttcttgaatatgcgaatgtggcagaccgaacacgtgcctacctgcaagagcatgcaacaattttgatggaagaggacgccttgccggtactacaagcaacgaaatggagctaagacatgccttggaccattaactatatattcgttttgattgggacctttttgatcgccattgtggcgactcctttggtacgctctttggccttacgtgtcggagctgttgacaatcccaatgcaagacgtatcaataaaaagccaatgcctagtgctggtggtctagctattttgttggcctttgtactagcgaccttggtctttatgcctatgattattcataaggatatctggcatgtttcttacattaggtatatcctgccggttgttgtgggaggatctgtcgtggctttgacgggcttcattgatgatatcttggaattaaagcctctacctaagatgcttggtattgttactggagctgtcatcgtttgggcttttacagacttccgatttgatagctttaagattccatttggtggtcctatgattcattttggaccagtcttgaccttgatcttaacggtattatggattgcggccatcaccaatgccattaatctgattgatggtttagatggtttggttggaggagtttctatcatttcccttatgactatgggggtgatttcttatttcttcctctatgatactgatattttcttgaccatgaccatctttgtcttggtggctgccattatgggcttcttcccttacaattatcatccagcgattatctatctaggtgatacaggggcgctcttcattggctttatgattggtgtcttgtcattgcaaggattgaaaaatgcaactgcagtggctattttgtcacctgttattatccttggagtgcctattgttgacacagtggtagccattgtccgccgtaaattgtcagggcgtccagccatggaggctgacaagatgcacttgcatcatcgccttctagcaatgggtttcactcatcgaggagcggttctggtggtttatgccatcgctatcctcttttcattgattgccctcttgttaaacgtttccagtcgtctcggtggtattctcttactcttaagtttgattttaggaatggaaattctgattgaaggacttgagatttggggcgttggtcgaacacctctcttcaacctcctgaaatttatcgggaacagtgattatcgccaagcaaccatgttaaaatggaagcaagggcgaaaaaattaaacatttgaaaagccaagtaatggcttttttgttataatgattctaattaaggaaaatggaagttctctttttattttccggaaaatagcaagactattttcaaaaaaataatacaaattagcgagcaagtgctcgctgtatatatgaaaaaggagtatacaatgtctgtacttgaaatcaaaaatcttcatgtttctgttgaagataaggaaatcttgaagggtcttaatttgactcttaaaactggtgagattgctgctatcatggggcctaacgggactggtaaatctaccctttcagctgctatcatgggtaatccaaactatgaaattacagaaggggacatcctttttgatggtgaaagcatccttgacttggaagttgacgaacgtgcacgcctaggtcttttccttgctatgcaatatccagctgaaatcccaggaatcacaaatgctgagttcatccgtgcggcgatgaacgctggtaaagaagatgacgaaaagatttctgttcttgatttcatcactaaattggatgaaaagatggaattgcttggtatgcgtgaagaaatggctgagcgttaccttaatgaaggtttctcaggtggtgagaaaaaacgtaacgaaattcttcaattgctcatgttggaacctaaatttgcacttcttgacgaaattgactcaggtcttgatatcgatgcccttaaagtggtttcaaaaggggttaacgctatgcgtggcgaaggcttcggtgctatgattatcactcactaccaacgtctcttgaactacatcactccagatgttgtacacgtaatgatggaaggtaaagtggttctttcaggcggtcctgaattggctgctcgtcttgagcaagaaggttatgcgaaaatcgctgaagagctcggttacgagtaccacgaagaagcgtaagtctgttactcgaaataactagaaaaggagtaacctatgtcaaaagaatctattatcgctttttcacaagcaaaagcagagccaacttggttgcaagaccttcgtcaagcagcctttgataaacttgaaagtttggctcttccaaaaattgagcgtgttaaattccaccgttggaatctcggtgatggaacgattactgaaaacgaaccatcagcaaacgtgcctgattttacagcgcttggaaacaaccctaaattggtccaagtaggaacaaatactgtacttgaacaattgccagctgacttgattagtcaaggtgtggtcttcacagaccttacgactgctcttgaggaaatcccagaagtcgttgaagccttctttggtaaggctgtagcctatgacgaggacaaattggcagcttataactatgcctatttcaatagtgcagcagtcctttatgtaccagataatgttgaagttgacttgccagttgaaagctatttttaccaagatggaacttcaaatgttccatttaacaaacacgttttgatcgtggcgggtaaaaacagtaaattgacttaccttgagcgctttgaaacgctaggtgaagcgactgaaaaagctagtgccaatatttcagttgaagtcattgctcaagacggtgcacaagtcaagtttgcggctattgaccgtttgggtgaaaacgtcacaacttatattagtcgtcgaggtcgtatcggtcgtgatgccagcattgactgggctctcgggatcatgaacgagggcaatgttattgctgactttgatagtgacttgattggcaatggaagtcatgccaaccttaaagttattggtctttcatcaggtcgtcaggttcaagggattgatactcgtgtgacgaactatggtaacaactctgtgggacatatcctccaacatggtgttattttggaacgtggtactttgactttcaatggtattggtcacattgtcaaaggtgctaagggtgctgatgcacaacaagaaagccgtgtgcttatgctttctgacaaggcacgttcagacgccaacccaatcctcttgattgacgaaaacgaagttacagcaggacatgctgcttcaatcggtcaggtagatccagaggatatgtattaccttatgagtcgtggacttgatcaagacactgcagaacgtttggttattcgcggtttcttaggagcagttattactgaaatcccagttaaagaagtgcgcgatgaaatgatttctgtaactgatacaaaactaaacaaacgttaggaactatcgacacagatagtctaacctatgatatatctagatagggagataagatgtcagctttagatgcctataagattcgacaagattttgccattttagatcaggtagttaatgatgaacctttggtatacttggataatgcagcaacgactcagaagcctcaagtagttttggacactctcatggcctactatcatgaggacaatgccaatgttcaccgtggtgtgcacactttggctgagcgtgcaacagctgcttacgaagctagtcgtgaaaagcttcgtcagtttatcaatgctaaatcaaccaaagaggtcctctttacacgtggaacgacaactggtcttaactgggttggtcgttttgcagagcaggttcttgagccaggagatgaggtggttatttcaattatggaacaccactcgaatatcattccttggcaggaagcttgtaagaagacgggggctaaacttgtttatgcctacttgaaagatggccaattagatatggaagatttggctaacaagattactgaaaagacaaaatttgtcagtctagctcaggtctctaacgttttaggctgcatcaatcctgtcaaagaaattgccaagcttgcccaccaagttggtgcctatatggtggtggatggagcccaatcggcgccccacatggccattgatgttcaggatttggattgtgatttcttcaccctttctggacataagatgttaggcccaacaggaattggggttctttatggcaaggaagagattcttaaccagatgaatcctattgaattcggtggtgagatgattgattttgtttacgaacaggaagccacttggaaggaattgccttggaaatttgaggctggtacacctaacattgcgggggctattgctcttggtgctgctgtggactacctctctgctttaggtttggaaaatattcatgcttacgagcaagaattggtagactatgttttgcctaagcttcaggcgattgatggtctgacagtctacgggccagaagatcctagccagcatgcaggtgttattgcctttaatattgataggcttcaccctcatgatgtggcgacagctcttgattatgaaggagtggcagtgcgtgcgggtcaccactgtgctcagcctttaattaatcatttaggaatctcatcagctgcccgagcaagcttctatatttacaatactaaagaggattgcgacaagcttgtggaggcaattcttgcgacgaaggagtttttcaatggcactctctagactagatagtttatatatggctgttgtggccgatcactctaagagccctcaccatcatggtgtcctacctgatgtggagcaacttcaactgaataatccgacttgtggagatgttatcaatctgtcagttaaatttgatggtgacgtgattgaagacattgcctttgctggtgatggttgtaccatttctacagcttcatcaagtatgatgacggatgcagttattggaaaaaccaaggcagaggctttggaactagcggagattttctctcttatgattcaaggagatcataaagatgaagataagctgggcgaagccaagctcttggcgggggtttctaaatttccacaacgtatcaaatgtgcaacactctcttggaatgcccttaaaaaagccatagagagaagcgagctttaggaagtcagggagcagttagtctccttgcccaagcaaaaaagaaaatgaatcaaacctttaataaaggaaaatactatgactgaaacaaatgaaaaagtagaaccaaaacccattgatttgggagaatataaatatggtttccatgacgatgtgacaccagtcttttcaacaggaaaaggaatcagtgaagatgtggtccgtgccatgtctgctgaaaaaggggagcctgagtggatgcttgaattccgcttgaaatcattggaaacctttaacaaaatggccatgcaagagtggggaccagacctttctggtattaactttgatgacttgacatatttccaaaaagcatcagacaaacctgctcgtgactgggaagacgttcctgagaaaatcaaggaaacttttgaacgtattggtatcccagaagcagagcgtgcctatcttgctggagcctcagctcagtatgaatcagaagtggtttaccacaacatgaaagaagagtatgacaagttgggtattatctttacagatacggactcagctctcaaagagcatccagagctctttaagaagtacttctcaaaactggttccgccaacagacaataaatttgcggcccttaactctgccttttggtcaggtggtacctttatttatgtacctaaaggcgtcaaggtggatattccgcttcaaacctacttccgtatcaataacgaagcgactgctcagtttgaacgtacccttatcatcgtagatgaaggtgccagcgttcactatgttgaaggatgtacagcgccaacatacacaacggctagccttcatgcggctatcgttgaaatctttgcgcttgatggtgcctacatgcgctactcaactatccaaaactggtcagatagcgtttacaacttggtaactaaacgtgctaccgctaagaaaaatgcgactgttgagtggattgatggtaaccttggtgccgaagttactatgaagtacccatctgtttaccttgatggagaaggtgcgcgtggtaccatgctttcaattgccttcgccaatgcgggtcaacaccaagatacaggagctaagatgattcacaatgcaccgcatacatcatcatctattgtctctaaatcaattgctcgtaatggtggtaaggttgactaccgtggacaagttactttcaacaaggattctaagaaatcggtatctcacatcgaatgtgacaccatcttgatggatgacttatctaaatcagacactatcccattcaacgaaatccacaactcacaagttgcccttgaacacgaagctaaagtttctaagatttctgaagagcaactctactacctcatgagccgtggactctcagaacaagaagcaacagagatgattgttatgggatttgtggaaccatttaccaaagaacttccaatggaatatgctgttgagcttaaccgcttgattagttatgaaatggaaggatcagttgggtaaaaactctgataatctaaagggaccagatggtcctttttgttttgcttgaaaaatcaggagatgggctatagataactgttaggaacagagtaattgcaaagtgtagaaagcgtttacaactcatgtttaaaaagatataatagatttgaatagcaagtaatggaggggactaatatgggagtgtataacagtgactggctactcaatcaaattcgaggaacagctaatgtggtcagtaaggcttttaaatttgagactttagacattgatttaggtcaggtggaggacgagcaagggcacactgttgatggaaatgactacattgacgacttgttgatccatgaacagtatgatcaggcaactaccttcattcatagtcaactcaagcgtttgacaactaatgactataatctccttgtcagcgtctatattgagtatttggagattttgccacctgtaataaggcaaaaacaccattttgatgatagaaaaatagcaagtttgagggaaaaactatccgaattttcatggtaatttggtagagagtgtggaagcgaaacgccgagcgtttaggatttttccaccctcttttttgtgttataatagaatcactatggataaattaattaaaacaatttcagaatcaggttctttccgtgcttatgttcttgatagcacagaaactgttagaaccgcacaagaaaaacacaatactctatcatcatcgacagttgctttggggcgtacccttattgctaaccagatcttggctgctaaccaaaaaggtgaaagcaaaattacggttaaggttatcggaaacagctcttttgggcatatcatctcagtagctgataccaaaggacatgttaagggctacatccaaaatccaggtgtggacatcaagaaaacagcaactggtgaagttttggtgggtcctttcatgggacaagggcagtttgtttctatcatcgattatggaactggtaatccttacacgtcatcaacaccacttatttctggtgaaattggtgaagactttgcctactatttgacggaatctgagcaaacgccatctgctgttggtcttaatgtacttcttgacgaagaggacaaggttaaggttgctggtggtttcatgcttcaggttttaccaggagctagcgaagaagaaatcgctcgttacgaaaaacgcatccaagagatgccagccatttcaacgcttttggagtctgatgaccatattgaagccctcttgaatgccatttatggggatgaacctttcaaacgtttgtctgaagaggagcttagctttgagtgtgattgctcacgcgaacgttttgaaaatgccctcttgacgcttggtaaggatgaacttcaagccatgaaagacgaggatcatggggctgaaatcgtctgccaattctgccaaactaagtatgaattttcagaagctgacttggaggaactcatcaatgactaaacttaattcgtccttcatgattggaaatgtggagattcctcatcgtacagtattagctccgatggcaggtgtgaccaactcggctttccgtaccattgccaaggaatttggcgctggtcttgtggttatggagatgatttctgaaaaaggtctcctctataataatgagaaaacccttcacatgcttcatatcgatgagaatgagcatccaatgtctatccagcttttcggtggtgatgctgagggcttgaagcgtgcagcggactttatccagactaatactaaggctgatatcgttgatatcaacatgggctgtccagtcaataaggtcgtcaaaaatgaagcgggtgccaagtggctcaaggatccagacaagatttaccacatcgtcaaggaagtaacatccgtacttgatattcctttgaccgtaaagatgcgtacgggttggtcagacagtgatttggctgtagaaaatgctcttgcagctgagtctgcaggtgtttctgcccttgctatgcacggccgtactcgtgagcagatgtacacaggccactgtgatcacgagactttagcccgtgttgctaaggctatcaccaagattccatttatcggaaatggtgatgttcgaagcgttcaagatgctaaactcatgattgaagaacttggtgtagatgctgttatggtgggtcgtgcagctatgaacaatccttacattttcacgcaaatcaaccacttcttcgaaacaggagaggagttgccagagcttccatttgataagaaattggacatcgctgaagaccacctcaaacgtttggtagaccttaaaggtgaaaagattgctgtccgtgaattccgtggtcttgcaccacactatcttcgtggaacagcgggagcagctaaggttcgtggcgaagtctcacgtgccgagtctgtggctcaggtcgaagaaatctttgcaactttgcgataactctatatctgataaaaacttaaccagcttggttaggtttttattttacctttattcttccttgatagtgatgatagctcatctctaatctttttttggtccacccttgcaaaacctctgtgttttcgatataattaactggttaagtaaatggagaaagcaatgctagaactagaagaacaagtaaatcaattgattaatcagattttgcttaaggctgaaaatcagcatgagctcctcattggtcagtgccgtagtcaggttaagttgaccaatactcaggagcatattctcatgcttttgtctgagggacgaaagaccaattctgagttggctaagaccctcaatgtcagccaagctgctgttaccaaggcagttaaaaccttggtcaaagagggcatgttggaggctaagaaagataaggatgatgggcgcgtgacctactttgttttgacacaagaagctcaacccatagcccaagagcatgaggaacaccaccaagagaccttgggggtttatcggtctgtattggaacagtttgataatcaagagcgtcaggttattggacgtttcttgacaaaattagcagaaaaaatcgaggaataagatgcgctatattacagttgaaggactgagcttccagtatgatgcggagcccgttctggacaatattcattatcatttggattctggggagtttgtaaccctaactggggaaaatggagctgccaaatcaacgcttataaaggctaccctaggaattcttaagcctaagaagggaactgtaaccatctctgaaaccaataaagatggtaaaaagcttcgtatggcctatcttccacagcagattgccagctttaatgcaggttttccaagcacggtatacgagtttgttaagtctggccgttatcctcgtcagggctggttccgtcgtttgacgaaacacgacttggagcatgttcaacgtgccctagagtctgttggtatgtgggaaaatcgtcacaagcagattggacatctctcaggtggccaaaagcagcgtgctgttattgcgcgtatctttgcttcagatcctgatatctttgttttggatgaaccaacgacagggatggatgcaggaacagccaataccttctatgaactcatgcaccactctgcccataagcatggcaagtctgtcttgatgattacccacgacccagaggaagtcaaggagtacacagaccgtaatattcatctggttcgtaaccagaaattgccttggcgttgtttcaacgtccatgaaaaggatggagaggagcacaaacatgattagtgaattattagcctatgattttatgcaacgtgctattctcgccgtgattgctattagtatcttttcgccaattttggggctcttcttaattcttcgtcgtcagagcttgatgagtgatacgttgagtcacgtgtccctagctggggtggctgttgggattttcttgggacaatcaaccacttggatgacccttgtggttgtggttattgccgctttggtcttggaatatctcagggtcagttacaagcattatatggagatttcaacggctatcctcatgtcaatgggattggcagtggctcttattcttagtaacaaggcgggtagcagtagcatgagtctggatagctatctttttggttctatcatcacgattagctctgagcaggttcatgccctctttgtgattgcggctattgtactggtcttgacgctactatttattcgtcctatgtatcttttgacctttgacgaggacactgctcatgtagatggcttgccagtacgtctcatgtcgcttctcttcaatattgtgacaggtatagcgattgctctgatgattccagcagcaggatcacttttagtttctaccatcatgattcttccagcagctattggtatgaaaataggtcaaacctttaaatctgtcattttttgggctattggtattggtttggttggcatgctctctggtatttttatttcctattattgggaaacacctgctagtgccactattacccttatcttcatcgccttctttggtctggtatcaatctttgaacctctcttaaaagcagagtaagtatatagaagaaaagagcttgagaaatcgagctctttttgtgatatactaaagtggtttttgagagaagttaaaataagaatggtagctttctaggcagaaatgatgattatatttctctggtatccactatcatttgtaatagtaacaaaaaaggagaaaacatggaaatctttctaacgagtatatcgggaatcctagtcattttgggtatgattttagtgggattcgtaatgggtgaaaaaggctggtttgacgacaagtcacgtggtcttatagctaagctagtcactcaaattgcccttccttgttatatgctctatacgattacacagcgtttcacagcggcagacctacttaaaatgttgccggaattgcgttttcctacactttctatggtgattttactcgggattgcgacagcggtggctagaatttttgcagtgaaaaaggagcgtcgtggtctctttatttccatgttttttaattcgaataccatttttgtggggctccctatcaatcaagccctctttggcgacgctagtatcccctatgttcttatctattatatgtgcaatacgacctttttctggaccttggggacctacctcatccaacgtgatggggaaggagacgctgaatttgatttaagaacaagtctgaaaaaaatcttttccccccctctaatgggcttcatgttaggccttcttattgttatcctccatattaaattaccaagctttttagccagtgacttgcagtatttaggtagtttgacgactcctttatctatgattttcatcggtttgtcagtatccaatgcaggtgtcaagcagttggttcttaaaaaggaccagttactgattttgctgggacgctttgtggttgctcctctcttaatggctaccatcgtatattgggcgcccctcccaactttgatgaagcaagtttttatcatccagtcggctatgcctgtcatgaccaatgctccagtcgttgctaaactatatggggctgatagtgattacgctgctgtcatggttactgagactacccttgctaccatgattgtaattccaattttgatggtccttatggcttaaaaataatcaagtaaccccggtttttctggggttttttaaatttgtaaaaaaattcaaaaaaagtttacgaaaacgctttacaaattgtaaaaagatgctataataattacataagttatgcaaacgtttgcatcaaaacgtaggaggaaatgaaatgaataagctaaaagaaaaatttggctttgagttctggcaaaaattcggtaaagccctcatggttgttatcgcggttatgccagcagcaggtctcatgatttctatcggtaaaacgattgccatgattaatccaaacatggcaccactcgttattactggtggatttcttgagcagattggttggggggttatcggtaaccttcacatcttgttcgcccttgccattggtggtagctgggctaaggaacgtgcaggcggtgcctttgcggcaggtcttgcctttatcttgattaaccgtttgactggttcaatctttggtgttacttcagatattcttgctgataaggctgctacagtccacaccatttttggtcaatcaatcaaggtatctgattacttcatcagtgttttggaagctccagccctcaacatgggtgtgttcgtaggtatcatctctggtttcatcggagctactgccttcaacaaatactataacttccgtaaattgccagaagctttgtcattcttcaatggtaaacgcttcgtaccattcgtagttattcttcgttcagctatcgcagctatcgtccttgctatcgtatggccagttatccaatcaggaatcaacggcttcggtatgtggattgccaactcaaaagaaactgctccaatcttggcaccgttcttgttcggtactttggaacgtcttctcttgccatttggtctccaccacatgttgactatcccaattaactacactcaattgggtggtacttaccacgtattgactggtgccgctaaaggtactgaagtattgggtcaagacccactctggcttgcttgggttactgaccttgcaaaccttaaaggtgcacacccagaacaatacaaacaccttcttgaatctgttacaccagcccgctttaaagttggtcaaatgatcggttcattcggtatcttgatgggtatcgtcgtagccatctaccgtaacgtcgatgatgataaaaaacatcaatacaaagggatgttgactgcaactgcacttgcaacattcttgacaggggtaacagagccaatcgagtacatgttcatgttcgtggctactccactttacatcgtttatgctttggtacaaggatgtgcctttgccatggctgatatcgttaaccttcgtgttcactcattcggttctatcgagttcttgacacgtacaccacttgctattaacgctggtttggcgatggatatcgttaacttcatttgggtaactgtactctttggtgttatcatgttcttcatcgcgaacttcatgattaagaaatttgactacgctacaccaggacgtaacggtaactatgagcaaggtgatgatgctccatcagaatctgctggatcagcaagtgctggaacaagctcagcaagctcacaagttatcaacatcatcaaccttcttggtggacgtgctaacatcgtcgacgttgacgcatgtatgactcgtctccgtgttactgttaaagatgctgataaagtcggaactgaagaacaatggaaagctgaaggagctatgggtcttgtcatgaaaggacaaggggttcaagctatctatggtcctaaagcagacgtattgaaatctgatattcaagacgttcttgattcaggtgaagttattcctgaaacacttccaagtcaaatgactgctgttcaaaaagcagaagctaccttcaaaggtgtgactgacgaagtacattcagttgctgatggtcaagttatcaacatcgaagatgttaaagacccagtattctcacaaaaaatgatgggtgacggtttcgctgtagaaccagaaaacggtaaaatcgtttcaccagtagctggtaaagtgacaagcatcttcccaactaaacacgctcttggtttggtaacagacaatggtcttgaagttttggttcacatcggacttgacactgttagtcttgaaggtaaaccattcgacgttaaagttactgaaggtcaaacagttgctgcaggtgatctcttggttgaagcgaaccttgatgctatccgtgaagcaggtcgtgaaacatctacagttgttgtctttacaaatgtagatgcaatcaaatcagttaaagtagaacatacaggtaaattggctgctaacgctccagttgcaaaagtagaactttaatttgctaaacgataaacaagcagacagcccttgggctgttttgtttgtaaatgaccctatgtcatttctagatgcaagtcagaagagggataaacttatgaaatttctaactttaaatacccacagttggatggaagaagatgcagaagggaaattccaaaccttaaaggaacagattcttaaagctcagtatgatattatttgcttccaagaagttaaccaagaaatagagacttctgttgtagacacggatgattactatcatgcacttccatcagcaacaccaatccaccaagatcactttgtccgtcttcttgtggaaaagttggctgaagaaggtcttcaataccattggacttgggcttataatcacattggttatgatcaccttaatgaaggggttgccgtcttgtcacgtcaaccattgacagctagcgaaatcttggtttcagatgttgatgatccaactgactaccatacacgccgtgtagcagttgctgaaaccactgtagatggccgagaagtggctgttgctagtgttcacctttcatggtgggacaaaggtttccaagaagagtgggtacgtattgaggaacgtttcaaagctattggaaaaccactcatcctagcaggtgactttaacaacccagcaggtcgcgaaggttatcaagccattttggctagcccactcaatcttcaagatagttttgaagtagctaaagaaacaactggtagctatacagttggacctggtatcgatggctggaagggcaatgaagagcctttacgtatcgattatgtctttgcaagccaagagtggacagtaaatcgccttagtgtcatttttgatggaaacaatcaacctctagtaagtgatcactatggccttgaagcagaccttgcatttagatagtaactgtagcctatcttgacctaataagggtaaaaagtattgtcaaaagataaataaaagagtagaataaagggtagaattgatttttttaaaggagaaactaatggctcatattacatttgattattcaaaagtattagacaaatttgttgcaccacatgaagtggaatacatgcaagcacaagttacagcagcagataatgctctacgaaacggaacaggtcccggagcagaaatgacaggctggttgaatctgcctgaagaatatgataaagatgaatttgctcgtattcaaaaggcggctgctaaaatccaatctgatagtgaagtgttaatcgtcatcggtattggaggatcttatttaggggcacgtgcagcgattgatttcttgaataattcttttgtaaatctacaaagcaaggaagaacgtaaggcacctcaaatcctctatgctggaaactctatctcatcaagctatttggctgatttggtagactatgtatcagacaaagatttctctgtcaacgttatttctaagtcaggaacaactacagagcctgctattgctttccgtgtcttcaaagaactcttggttaagaagtatggtcaggaagaagcaaataaacggatttatgcaactacagaccgcgctaaaggtgcagttaaggttgaagcagatgctaatggctgggatacttttgtagtgcctgatagtgttggtggtcgttttacagtattgacagcagtgggactcttgccaatcgcagctgcaggggctgatatcagcaagttgatggaaggagcaaatgctgctcgcaaggcttatgcttctgataagttggctgaaaatgaagcatatcaatatgcagttgtacgcaatatcttgtaccgtaaaggttatctgacagaagttctagctaactacgaaccatcattgcaatacttctcagaatggtggaagcaattggctggtgagtcagaaggtaaagaccaaaaaggtatttacccaacttcagcgaacttctcaacagacctgcactctttggggcaatttattcaagaaggaactcgtatcctctttgaaacagttattcgtgtagataagcctcgcaaaaatgtgttgattcctgaattagcagaagacttggatggccttggctatctgcaaggaaaagatgttgactttgtcaataagaaagcaacagatggagtgctgttagctcatacagacggcggagtgccaaatatgtttgtgaccctgcctgagcaagatgagttcactttgggctatactatttacttctttgagttagctattgctctttctggctacctgaatggtatcaatccatttgaccaaccaggtgtggaagcatacaagaagaatatgtttgccttgcttggtaaaccaggctttgaagagcttggtgctgagttgaatgcacgtctttgattctcatatgctttgagttcatttagaatataaaaagatccacaagttcatttctagtggattttttagtacaagcctcttaattagtttattaattttttgaacagtgtaaaaaagagtgtcttaattcttttatgaaagcgctgtataattgccttgtaaataaaatttgagaggtatcaaaatgaatgattggttagacattaaaggcaaaacagttcttgtgacgggtgcgtcatctgggattggtaaggcaatagtcgaagaattgttggaattaggagtcaatgtagcgaattttgatcttagcgacaacgatttgcgtcacccgaatctattatttgtaaaagttgatgtaacttctcgctctgaagtagaagcaggagtcgctaaaatagttgaaagatttggcaatattgatgcggtagtcaataatgcggggattaatgtacctagattattaatcgatgcagaaaatcctaaaggtccttacgagttggacgatgagacgttcgaaaaaataacaatgattaatcaaaaaggtttgtatttggttagtcaggcagtaggacgtattttagtgaaaaatggaaaaggtgtaattgtgaacatggcttcagaagcaggcttggaaggttctgaaggacaaagtgcctatgctgcaacaaaagcagcagtctatagttacactcgttcatgggcgaaagagcttggtaagcatggtgtacgtgtggttggaattgctccaggaattatggaagctacgggacttcgaactctttcttatgaggaagctcttgcttatacccgtggaaagacggtagaagatattcgagctggttatgcttcaacctcaacgactccattgggacggagtgggaaactacgtgaagtagctgatcttgtagcgttctatatttcagaccgttctagctatataacaggtgtcactacaaatattgccggaggtaaaactcgcggataaaacaatgaaggtggggaagagagttgaccttagtaaatcgatggtataatattttagacaaaatggtttcgcagccaacttattccttggtagatatgcgctcagaactggatattagtttgcaaaccttgcaaaagagtatccaacaattaaatgatgttttggctcctaatatccagattatctcacaagatgatctgttaatgttggaagtgtatgactatacagagttggaaaggattttatctggtagtttaaaacaggagagtgacttcaattcttccagtaaaagaattgcctatttgctaaaacgtttaattgagtcaacctcccctcttcttattgacgacttggctgaggaagtaggtgttagtagaagtacccttaataaggatttaaaacaagtaaaatctttggcagagagttactctattactatttcaggaaagcccaaccgtgggctggaggtcttggggagcgagctgaatttgcgcttgctctatattcaccaagtggctccttactttgaagaaaggacactcactgaggcaacctcttcttttctggagacgctagtccaggactataaaatccctaaagaaacacaggaactccttcgaaagaccatttcaattatggtggaacgtattcatacatctaaggtgttgaattgtcctattccttattataagaatgatttaacagagacacctttggctgagaaattaatctatcatattgagatgacttataagatttccctcagtcagtttgaaatagactttttgtgttttccgtttaatgtccgttttattgacactttaagcaagccgtcttatcaatctgaacaggttgcaaacatttttcaagggattgtcaagaaagtcaaagaaacaatgttggttcactttgatgatgaagaattatttgaagaaataaagtctcatctaggcgctttaatcaatcgactgattttccatgtgcaagctaatgatatatttcatggcgaggttcaaactcaatatccttttgcttttgaaatggcgaaaattgctggagaagaactatctgcaattttgggttcagaattggaattatctgaaatcggatatctggctttgtattttgaaatgattttaagaaagcaaaattctgctgttaagggttctcgcaagcagatagctgtagtttgcacaacaggaagaggaaccgctgcgatgattattcagcaactcagacgagtccttggaaatgatgtagacattactcagtattctgaagaggattttaatgtggaattgaatcaggactatttcgcgatttttacgacagttcctctaaaatataaagattctaaatctccagtcattcaagttaatcatctttttgatgatcaatggctgcaggaagaatggcagaaagccaatgcttttcatcaaaaaaatctagaaacagttagcttacgctttcttcgattaagcccccaaaaaacctatcagcaatacttgctaaatatggttgcagagttagggaaacttcagatgattgataaaggttttatagaacggataattgatagggagaaaaagcaatcaaccatttttggtggaggaattgccttcccccatacaattaaccagggttatgcaaagactattttaatgtttggaaaactagaagagccttatcaaaaaggagatgaatggattgaatttatctttctagtcgccattccctcagaaattgaaacaaaaatggaaagtgaattactggaattgtatgatgatatttttagaattgcaggagagccttctctgaaagaggcattgagatcggtagaaacagagacagagtttctatcattttctaagagcaaaggagtattttaatgaattcgctaataattttcgccgtatttgtaatggcagcttatatatttcaaatgttcctcggctggcagcaactcaaagacttcaataagacctatacgatgctccgaaaactgggtcgcgtagcgattggcaggaagtccggaagaatcaaatccggtacgattgtcatgttcgcggttgatgaaaacggtcgggttcttaaagctagcaaaatgcaaggagtcacaatcttagcgcgttttcaaaatatggacgattatgttggagaagacatccattattttgacaagtataatcctcttgtgagaaaagaaaataagttgatgcaatcagccatagaagatgctagaaaagtctatcttttgcatgaggcaggtattgagaaagagacaagttcatctgattcttttttgggatttggcttttatgcgaattacttacaattatctattaaacagttattaaaaaaaaataagaaaaggggttccttatgaatcacattacaaaatttgcagagaattttatgaaactcttccaattaggtggagaaacctttattagctggatgacaaatattgtaccgcttgtcctaatgctattgattgcaatgaatacccttatcgctttcttgggagaagagaaggtcaattccctggctaagatttctgccaaaaatcctgttagccggtatatgattttacctttcatttcagcctttatgctggggaacccgatgtcaatcagtatgggacgttttttaccagaatattataaacctagttttgtagcagctcagatgcagttctgccacacttcaaatggtgtatttccgcatatcaatcctggggaattgtttgtatggatgggaatcgcgacagggattcaaactttaggcttgagtcaaatggacttagccattcgttacatgcttgttgggattgtcatgaactttgtaggtggctgggtaacagattttacaactgcttatgttgcgaaacagcaaggggttaccttgagtaaaacatttgattgatagaaagagtgaatttatgtcatataagagtataaaagttgttaaaggaaatggcggtttcggaggacctttggtcattactcctagtgaggcaaagcataaatttatctatatcactggcggcggagaaaagccagatattgtggataaaattgctgatttgacaggtatggaagctgttaatggatttaaaacatctattcctgatgaggaaattgctttggcaattgtagattgtggcggaactcttcgctgtggaatctatcctaagaaggggattccgacgatcaatattgtcgctacaggtaaaagcggacctctagctcagtatattacagaggaaatctatgtatcagcagttggtcttgatcaaatttccgctgctaatgaagatgaaaaagcgacaacggtggttactgaaaaaccaacttacgatactagtaaaaaaatcacagaacaaaaagcagaaacaagtattgtagcaagaattgggatgggggctggtaaggttgttgcgactttcaaccaggctgctcgtgaagccatccaaacaatgctcaatactattattcctttcatggcctttgtttctttactaattggggttattcagggttctggtgttggaaattggctggcaaaactaatggttcctctagctgggaacatttggggactcattttgattggctttatctgttccttgccattcttatctcctttgttgggccctggagctgttatcagtcagattatcggaaccttaattggagtcgaaatcggaaaaggaaatattccgcctcaaatggctctgccagctatatttgctatcaacactcaaaatggctgtgatttcattcctgtagcacttgggctatctgaggcgaaagctgaaactgttgaggttggtgtcccttctgttctctattcacgttttctcaatggtgttcctcgggtcttagtagcttgggtcgctagtattggtctttatcagtagagcatggttaggttgtgcacacatataaaaaatagtatcttaaacttatctattaggaacatgaaagattagagaaaggatggatcggaattagatgaagaaaatttttgaagctaaagtaattcaagtgggacctgaagctcagaatatgattcaagacgctaatatgctcattttatttggagaagaagctccgggagacttagcagagtattgttttaagattgataacaaaaatctgctaggttcaatactagaaggcggcaagctggtggtagataatcaggaatattcgattactgccgtgggaaatgtagtagaaaaaaatttaactggactgggccatatcactatttcttttgatggttcaaaagagggcagtctgccgggcactctccatgttgcagcagaccaagcagtagtaattgagaaaggttctaccattcagattttctaagtagctcaagtaggatagaaaatcaaatcctgtaaactatcaaagcagcagcctaaaactaaacgcagcctcccttaggggaggttcggattgaagacaaagtccttagaagacacttttctaagggcttttctttttgtaaagttgtataatagaggtaagaaaagttgtgaggtgctagctatgtttcacaaagaaaaacctgattatcatcgctgccaatatggcttctatacgatagacgaattggtcccagaagatcactttcttcgccaattggaatcagaggttgatttcgactttatgatactgtcaataattttgtgtaaacactcaagtagagttatagagtgctaatcaaataagctttcaagtgtgtcagaacattgtccaaaccctttatggattcgttgactttgcttgaaattataatcttcaaacaaagtaactaagtaacgttccagagcctcctcgttaggaaaaagaaccttctttttcgtttgacgtttgatttctttgttaagagactcaatgaggtttgtcgaataaatgctgtgccaaatttgatagggaaactgaaaaaaagttaaaagattatccgttttctccaggctttccgtgactttcctatactttggtttccattcggcgataaagtcctctaaagcttgtactgccatttctaaattttcagcacgataaatcattttaaattaccccagaataaccgctcgatcagatcgtttcaccctactagccagatttcgactaatatgaatcaagcaacgttgttgtttagctaatgggtaagcctgactgataatctgctcaagcccttagaatcacaaaaacaactagatagcttacgagtacgtaaaacagataagattgacgctgaaaaactagctacgtctcagttcatcctcaatcgtaaaccaagctatgtccaagaagtgctttatcaagaattacgcgacctcagccatttctatcagaatcttactggggatattttctgcgctaaaaatcgtctgcacaaggttctacaggtctcttttcctgaattgtaaaacatcttatcttcaccaactgtgggaacaatattggaacttggtcatgacttttccatgtaatagttttgtactggagttagatgacgccgaattaacagctatcatccgtcagtctacggcaaaacgcatctctgaaaaacgtgtgacttacttagtagataagcttacaaaactagctaatcagtcttattgtgaggtcaagaaaacctctccaatgatggaagagatcaaatactatgcaggggagttacttaggctttctgaatatagacaaggcgttttagaggagatggtaactttggctcaacctttgccagaatacgagattcttctctctattcctggaatcactgaaaccacagcgacaagtattattggcgaacttggtgacattcgtcaatttcattctgccaatcaaatcaatgctttgatcagcattgacctcagccactatgaatctggggactttctagcaaaggaacatatcaccaaacgtgggaatccctatgccataaaggttctctttaagtgcattcataacatagcttcagctggctacaccaatccttgtcatatagcagacttctatgagaaacggaaaagacaatcgcaagtgacttcaaccaaaccacacacgattgcctctacacatcgtctcattagaacaatgtattacctcataacacataacaagctttacgattatacttctacccaaaatcggtaaaattgtttatgccatatgattgtaacaccttatcaaaaaaccactaggtaaggtgttgtttttgcgtgcactttttacactaaactttagttcaaaaatagacaaactccttagtttgactatgtaattcaatctatttttttatcaaatgccttgatatgcttgacaaatggtagaaaaggactcagtcctgtgcaatacagaactaaatcctttggataaattaattgtctaactttttggggtcagtacaatttttatgggactttttgtgtatactcaaaaagctctataatctctacagtggttttacaaatcacagaaataaaaaaatctgaattattagcgaaattttgttctttaaaggaaaatagagtttaattggaagtggtataacaaatttcgtttttattcatttaaatagttgttaagaaaaattgatttagattatctgataataagtttttacttgacaaattgaagatagtcatcttttatgactataccaatttaattgttgacaactaataaaactaggtatataatgactttgttcggttcaataataggatattgaactataccaatttgtaggaaagggatagtaatttaaaagttgctacaggtaataattaatgtgtggaattgttggagttgttggaaatagtaatgcagtggatatcttaatacagggtctcgaaaagttagagtatcgcggttatgactcagcaggtatttatgtgactgatgccccagataaaggttgtctagttaaatcagttggtcgtattgcagatcttcgtgctaaaattagctccgatgttaagggatcaactggtattggtcacacgcgttgggcaacacatggtcaagcaactgaggataatgctcacccacatacttcggaaacagggcgcttcgttttagttcataacggagttattgaaaactatctccaaattaaagaagaatacttgcaaggacacaaatttaaaggtcagacagatactgagattgcagttcacttgattggtaaattcgttgacgaagatggattatcagttcttgaagccttaaaaaaatctcttcatattatccaagggtcatatgcgtttgctcttgttgactctcaagcaccagatacgatttatgttgccaaaaacaaatctccacttttgattggtgttggtgaaggttacaacatggtttgttcagatgccatggctatgattcgtgaaactagtcaatttatggaaattcacgataaagagttggttgttctgaccaaagatgctatcacagttaccgattatgaaggaaatgctattgaacgcggtacttatacagctgaacttgatctttctgatattggtaaaggaacttatccttactatatgttgaaagaaattgatgagcaacctactgtaatgcgtaaattgatttctacctatgcagatgatgaaggaaatatcactgttgatccagctattgtcaagtcagtacaagaagcagatcgtatttacatcttagcagctgggacttcatataatgctggttttgcgtcaaaagctatgtttgaaaaattgacagatacaccagttgaaataggtgttgcatctgagtggggttacaacattccacttttgagcaaaaaaccaatgtttgttttgcttagtcaatcaggtgaaacagcagatagccgtcaagttttggtgaaagctaacgaaatgggaatccctagtttgactgttaccaatgtacctggttctacgctttctcgtgaagcaacatatacgatgcttttacatgcagggcctgaaattgctgtagcttctacaaaagcttatactgctcagattgcggctctagctttccttgcgaaagctgttggtgaagcaaatggcaagaaagaagcacttgagtttgatttagtgcatgagttatcaattgttgctcagtcaattgaagcgactctctctgaaaaagatatgatttctgagaaagttgagaacttgttggctacaactcgtaatgctttctacattggtcgaggaaatgattattatgtagctatggaagcatcattgaagttgaaagaaatctcttatattcaatgtgaaggctttgctgcgggtgagttgaaacacggtacaatttcattgattgaagatggtactccagttttaggattaatttctgcaagtgaagttgtggctgctcatactcgtggtaatattcaggaagttgctgctcgtggagctaatgttttaacagtcgttgaggaaaaattagctaaagctgatgatgatattattgtcaatcaagtacatccattcttatcaccgatctcaatggttattccaactcagttgattgcttactatgcttctctacaacggggtcttgacgtggataaaccacgaaaccttgcaaaagcagtaacagttgagtaagttagtttccgcattctaaattttattagctcttttttatcatttatcaagtctatcaaagctttaagttaaaaatgagataagacagtactattctgagtttattgtcttagttttaacaatttttgagccataaaaaggcatgctaaaaaatacctttcctggtatttttgatcaaggtttcttgccagtttgtcaagtgacgtatagcgctatactacaattttacaagaccccactactttaacctaacgaaaaagtagtgagtactctctggttggagattttctcactactcatcttagtatgtttgtcaactgtagtgggtggcgaaaagctaacatctagagaggaccagataggtcttctctttttttatgtttagagtgatgaagatacgtttcttaaagttgatgaagtttctaaaaccgaagcccaaccgtttgatgtctttaatcaacttgttagtagcttccagttttgcgtttgaatagtctgtttctagtgcattttggatgtattgcttgtgtctaagaaaagtcctaaagaccgtttgaaaatagtgattgaccttgcttctattttcctctatcagctcaaagaactcatctactctcttctcctgaaagtgaaaaagcaaaagctgataaagagtatagtagtcggtgagctcttctgaaaagaccaatgtcttctcaatgacttcatgtgggcttaaggtttgacaaaatgtcttcgagtgaaatgagttacaagatagcttacgactgtccttttgaaaaagtcgccagtgatttttcaaggctcgataaggtagtgacttcttatcgaactggttcataatcgcaattcttgtctttaaaaaggcacgtccaaggtactggataatgtgaaatcgatcaagaacaattttggcgttagggaaaagtcttcgagctagtggcatataagttcctgacatatctatcgtgataaactgtaccttttggcgagctttcaacggatacttcaaaaagtagtttcgaatagtggtttgacggcgattatcgaggatagttatgagtttgttggtctcatagtcttgcgccacaaaagcgagttcacctttcttgaacccaagctcatcccaggacataatagctgggagtttgtcatagtgttccttgaaagtaaactggtcaagtttacgatagacagtggatatcgatacacgaagtcttctggcaatatccgttaatgatagcttttcagttagaagttgagcaaccttttgtcggacaaggtttgagatttggtgatttttctcaacgattgatgtctcagcgaccgtgactcgcctacaacttttacactggaagcgacgtttcttcagacgtagtagtgtcggagttccagcttgctctagaagagggattttagaaggtctttgaaagtcatatttaatcatctttccttggcaatgtgggcatggtggtgcagggtaatccagttttgcatgaatttcgatatgagtatcagtttcaaaaacaagagaaataatgatgttagggtctttaattccgattaattctgtggtattcttaataggtctcataagttcttcctaatggtagtttcgtcgcttttcattatagttcttatgggactttttgtgtatactcaaaaagctctataatctctatagtggttttacccactacagaaattatagagccgtaatcagataagatcagctttggctggtctttttttaaccatttgtaggctaaaactctccattaatgatttcttgtagcttaatttacgaacttttattctaaacgtttcggacgggctagttgggttttgtggctctttaatttagggatgattgttgctataattagttcaagcataggaggatgaatcatgattggacctgtggaaatgggtgctttgttgaaaaaaattcgtttatcaaagaatttgacattgaaagaacttgctagtgattatttatcagtatctttcttatcaaaatttgaacgtggagaatctgatatctcattatctagattttttcttttgttagataaattggatgtcagtattgaagagttctatggtattttatctcaagataatccgactcatactgaaaagttattagaaagtgctagtaaggcttattatcaaaacgatagtttatcgttacagaagtacgctggagaagagcgtcgtaaatttgagctcacacaagacaaatcatttctctataacagtattatgctagaatcttttttggcaagtgtttcaaataaagaggttgatgaaaataaggtaagggaattaacagactatctttttagcattgaacaatggggaaaaagagagttaatcatattaggaaatagtatgtcgtttatttccacccagacacttaatgttttgaccaaggagattgtgtatagaactagactttttggaaatagcgactcaaatcaaagaatccgaattagtcttcttattaatgcagcttatgaatttttacgacgtgatgaactagattcagcgaaatactatttagatttagtcaatgatagtggaattcctgaggtcctcttatatgaaagacatgagttgatatttgtaatggggtcttacttgataaagtcgggtgaagttgctgaagggagaaatctaattgaggggtgtttagaaactcttaggactttaggtgcggaaaagttattgcttgctaaggaatcagagtatcaagagttgttaaattccactatatgacaattttatagagtgagttaaaaaatagaataaactaagaccatagtacgacatcactatggtttttaattttcaatggatatatggtattccaatgtcttcaatttatccaactgattatataccaaggtgatttagattgtgaggaaatctatgagaacctatattcttaaatacaagtatgacaatttagttcatatcctactgttagcactgaatgctgctattttcgtgagtgcctcggtaaccttagctttaatgacgaatcagctggtatctaagcgaatccaatcttttttagctctcttaggtctagaggtaggtctttacattatttatttagttttgaattatattattgcggtacatcaaacaaaattaatccaaaaaatgactttgtctattcgtcagtcttatcttagtaaaattattcaccattcttttagtgaatttagaaagagtgatattggagagcatctctcagtattaaataatgatatccaattgattgaatcaaatggcttttcaagtatttatactctttgttcaacagtattcaccactttgttttcaattatcgccttattaagttatgatgtaaggattgttctgctagccatttttttaactttgtgtctgacttatcttcccaaaccatttaccaataaaatgcagaaatcaatggagatattttccaaagcgaatgaggagcttgtttctggaataagcgatcagttatatggatatgcggatgtttattacgctagtcgtaaacagatatttcttagacaagtgaggtccattgttgagaaatatattgtacaaaaaattatttttacaaaaagaaagactagcactgagacgctgatggctttattttcagttatcgcccagatgttgatacttcttctaactggcttgttaattatttttggaaatattactgttggaaccattacctcagtaggacagatatcaggtaatatttttaactctctatccaccattaatcagctgcaagtgaccattaagtctgtcaatcctatcttaaaaaaatttcacgattttccagagggtccaaagacttgtatagcgacaattcaggatgttcattttgagaatgtaagttatcattttggagagaaggctatttttgagggattcacccaaacctttaaaaaaggaggcaagtatgctattactggatgctcaggtagtgggaagtcaaccctgcttaatatattcctaggcaatcttaaagattacgagggaacaatcttgtttggaaaattggagtcaaaagagattgatgagaactcaatcgtgtctaaatgtgcctatgttgggagtcaaactcatatctataatgataccttgaggaacaatctaactctttggaatgaagttattactgatacgcagatcaaggaagttcttgaaagagttaatcttttatctttcttaagtcgtatagatgagcaagtaagcgacggtagcttttcggagggtcaaaaacaaagaataggcctgataagagcgtttttaaaaggaagttctgttgtgatttttgatgaagccactgcaaatcttgaccataataatgctactcgtattgagcaccttttattaagtgatcctaatatcacttatatcacggttacccaccatcttataaagggaaatgaaccatattttgataagattattcgtttgggagaggggactgagtaaatgtttcatatgataaatgtttaggatttatttcaattttactaacggcagtcaaagtgctataatgtaagggattgtgaatttagcaagctttgctattttcaaaaaagaaaaaacaaatcagagatacaaatctcttagaagaggtgaatcccatgggacgtaaatgggctaatatcgttgctaagaaaactgctaaagatggtgcaaactctaaggtttacgctaagtttggtgtcgaaatttatgtggctgctaaacaaggtgaaccagatccagaatcaaactcagctttgaaatttgttttggagcgtgctaaacaagcgcaagtgccaaaacacgttattgataaggccattgataaggctaaaggtaacactgatgaaactttcgttgaaggacgttatgaaggttttggaccaaatggttctatgattatcgtagatactttgacttcaaacgttaaccgtacagctgctaacgtacgtactgcctttggtaaaaacggtggtaacatgggtgcttcaggttctgtttcatacatgtttgataaaaaaggtgttatcgtatttgcaggtgaagatgcagatgctatctttgaacaattgcttgaagcagatgtagaagttgaagatgtagaagcagaagatggtactatcactgtttatactgagccaacagatcttcacaaagctttggaagctctccgtgctaacggacaagaagagttccaagtgactgaacttgaaatgattccacaaactgaggttactcttgaaggtgaagaccttgaagttttcgaaggacttattgatgcgcttgaagcagacgatgatgttcaaaaggtatatcacaacgtagcagatatgtaatctcattcaacactttccgtcttatggaaagtgtttttatgtggtctgcctaaggatttgtcttgcttgtcctgacttaatctgatatagtagtagccaagtgaattattggaggaatacgaaatatgaatatgatgctagttttggccatttatgtggtcgcaattgttgcttatgtggctttcagccgtcgtcgccaagcaaaggcccaggaagatcgttttgcaggtcttgctaagggtgctgaggttgaaacaatcggtggtttgattgctattgtcgatgagattgacaaagaaaataaccgtattgttttggatgcagaaggtgtcttcttgacctttgatttgagtcgttcaatcatgaaagtgatcacaccagcaccaactacagaggcagcagaaacaactaaaaagacaattatcgaagaagattcagcaattgagtctgatgatgaaaagtaagatgtgtatttgagactaggttaaatcctggtctttttgcgttttctaatcttatcggtattaaaagctgttcagaacccctgaaaatgtggtaaaataaagggtaaactatatttagaggatattccatgtttaaatttagaaaaaaatctcatcaagaggttctagacaatattcccaaccatatcggtattattatggatggaaatggccgttgggctaaaaaacgtctacaaccacgtgtgatggggcataaggctgggatggatgccttgcaaaaggtaactatcgaagcgtcacaacttggagttaaggtattgacagtatatgccttctcaactgaaaactggtcacgcccacaagatgaagtaaaattcatcatgaatttgccagttgaattctttaacaagtatgtaccagaattagacaaaaacaatgttcgtattttgacaatcggagataacagtcgtctgcctaaggaaaccttagatgctcttgaaaaggcagttgagcagacaaaacataattccggtttggttctcaactttgcactgaactatggtggtcgtgcggagattgtatctgcagttcaagcgattgctaaagaggttgaagcaggcaaactcagtcctgaagctattgatgaagatctcattgccaagcatttgatgacagataaattgccttacctctaccgtgatccggatttgattatccgtacgagtggcgagcttcgtctaagtaacttcttgccttggcaatctgcctatagtgagttttacttcacagatgttttctggccagactttgaccagcaagggctacgtcaagccatctctgactacaataaacgtcaccgtcgcttcggtggtgtctagaaaggacctctcatgcaagaacgtttaattggtgggggtgtggcagcagccattttcctcccattgctctttatcggtggtcttcctttccaacttttggttggagctatggccatggttgcggtgtctgagatgcttcgcatgaagcacttggagattttctctatcgagggtattttatcaatggtggcagcctttatcttggctgtgccgattgatcagtattttatcagtcttccaacaaatgctagtgtgacaggtttcgctgttatttcatttttgattctagcggggacagtccttaatagcgaccactattcttttgatgatgcagcttatccaatcgcatcagccttttatgttggttttggtttccaaaatctcattgcggcacgtttggatagttgggaaaaagttctctttgccctttttattgtttgggcaacagatattggagcttacctttttggtcgtcaatttggtcagaataagctattgccaaaagtatcaccaaataagactattgagggtagtgtcggtggtatcttatccgcaatcattgtggctcttatctttggtttgattaaccacggcgtttatgcccctcataacttcttctggttgcttatctgtacgattctctttagtatctttggtcaatttggtgatttggttgaatcagctattaaacgtcactttggcgttaaagactcaggcaatctcattcctggacacggtggtgttttggaccgttgcgatagctggatcttcgttttcccaatcatgcacttcctaggacttttttaagagtggaggtgtctagatgaaagctattattacctttttactgattttctgtgtgattgtcgtcttccatgagtttggtcatttctttttcgccaaacgctcaggaattttggttcgtgaatttgccattggtatgggaccgaaaatttttgcacatacaggtaaggatggtaccgtttatactatccgtatcctccctttgggtggttatgtccgtatggctggttggggtgaagatacaactgagattaaaacaggtagccctgccagtctaacgattggatcagatggtaaggtaagacgtatcaacctttcggatcgccaggttgaccagacggctttgcctatgaacgtcactgcctatgatttggaagataagttaaccattacaggtctagtcctagatgagaccaagacctatgaggttgatcatgatgccactatcgttgaggaggatggtacagaacttcgtatcgctcctaaggatgtccaatatcaaaatgcaagcatttggggacgtttaattaccaactttgctggtcctatgaataacttcattcttggggtgcttgtctttattatcttagcctttgttcaaggtggtgttcaagatatatcgaccaaccgtatccaggtagccgatggaggcgctgctcaggtggcaggattgaaaaatggtgatgccatcgaggctatcaataaggacaaggttactgattgggacagcttgaaggaagcattgacagagaatacccaaaaattctccaaaggtgacagcctttctgtgacagttaagagaagtaacggtcaggaagaaacaatctctgttaaacctcaggagaaccaaggtagctattttttgggtgtttctcctgctttaaaaacaagtcttaaagataagatttttggtggtttccaaatggcttgggaaggggccttcaaaattctcgtagcacttaaggggcttatcaccaactttagtttgaataaacttggtggaccggttgctatgttccagatgtctgcccaggcttcagaaaatggcttgatttccattcttaaccttatggggatgctctcaattaacttgggaattttcaatcttatcccaattccagcccttgacggtggaaaaattgttatgaatattattgaagccattcgtcgtaaaccacttaatcaagaaattgaaagctatattacacttgcaggtgttgctatcatggttgttcttatgattgcagtcacttggaatgatattatgcgtgctttcttttaattagaaacaaagaaacgaaaggaagtctaagggacttgagccaagggccagcctccttagtatgtaaatgatgaaacaaagtaaaatgttgattccaacacttcgtgaaatgccaagtgatgctcaagttatcagtcatgcccttatggtacgtgcgggttacgtgcgtcaggtttctgctggtatttatgcttatatgccattggcaaatcgtgctatcgagaaattcaaaaccatcatgcgtgaggagtttgaaaaaatcggtgcggttgaaatgttggcgccagcgcttttgacagcagatttgtggcgtgagtcaggccgttatgaaacttacggtgaagacctttataaacttaaaaaccgtgataaatctgactttatcctcggtccaactcacgaagaaacgtttacagccttggttcgtgatgcggttaaatcatacaaacaattgccacttaatctctaccaaatccaatcaaaataccgtgatgaaaaacgtcctcgtaacggtcttcttcgtacacgtgaatttatcatgaaggatgcttatagtttccaccaaaactatgaagatttggatgtcacttatgaagactaccgtaaagcttatgaggctatctttacacgtgctggccttgaatttaagggtatcatcggtgatggtggtgccatgggtggtaaggattctcaagaattcatggcggttactcctgagcgtacagatctcaaccgttgggtagttcttgacaagtcaattgcttcattggatgagattccagaagatgtcatggaagaaatcaagaaagaattgacatcatggttggtatctggtgaagacacaattgcctactctacagagtcaagctatgcagctaaccttgagatggcaacaaatgcctacacaccagcgactaaggttgtgactcaagaagaagtgactcgtgttgaaacaccagattgcaagtcaattgatgaagttgctgctttcttgaatgttccagaagaacaaaccgtcaagactttgcttttcattgctgatgatgaaccagtggtggctcttcttgtcggtaatgatcaggttaacgatgtgaagttgaaaaactaccttgctgctgatttccttgaaccagctacagaagatgaagcacgtcaagtctttggcgctaacttcggttctcttggtccagttaaccttcctgaaaatgttcgtatcgttgcggaccgtaaggttcaagatgtggctaatgcggtcgttggagctaatgaagatggttaccacttgacaggggttaacccagagcgcgacttcaaggcagaatacgtggatattcgtgaagttaaagagggtgaaatttcaccagatggtcaaggtgtccttcagtttgcgcgtggtatcgagattggtcatatctttaaacttgggacacgttactctgaaagtatgggtgctaacgttcttgatgaaaatggccgtgctgttccaattatcatgggatgttacggtatcggtgttagccgtatcttgtcagctgtaatcgaacaacatgcacgtctctttgttaacaagacaccaaaaggtcagtaccgctatgcatggggaattaacttccctaaagaattggctccgtatgatgttcacttgattacagttaacactaaggatgaggaagccaatgctttgacagaacgtttagaagctgctcttatggctgaaggctatgatgtcttgacagatgatcgtaatgagcgtgttggttctaaattctctgacagtgaccttatcggacttccaattcgtgtgacagttggtaaaaaagccagcgaaggtgttgtcgaagttaaaatcaaggcaactggtgatactattgaagttaatgccgataacttgattgaaacacttgctatcttaacaaccgaacaaaatgcttaatataaaaaatcttttcttgcaggagcaagaagagatttttcttttgtagtgacaatgataaattgagagaaaagagagtaaattccaatttgacagaattgtctaaatagtgtaaacttaagactatcataactacggaggcatcacatgcttaacaaagcgacccatttgggaaatcttaaagctttttattactttagtttctttagataggacgtttgtgtttcaggatacaagcgtcagtcagtttgtatctatgaagctaaagcattttgtgatggattagccgattagatgaataggtctaaccggtgacataagctagcctgtgctagtcaagatgcataaaaccagttgggcctgtcctaactggtttttttcataccgtggtctatttttaattttcatttgacgctatcatctcggaaaaaagatgacagaaattggaaatagatagaataaaaaatagaggtatacaagatgaagaaattcttggtcagtatgatggctgtcattacagctgtcctcttggtagcatgttccaatgcttctaataaagatttggttcacgtcggtgtgctccaatatgtggaacatccttccttgtcagcgacacgtaaagggttcattgaagaactcaaagaggaaggttacgtcgacggtaagaacatcaaaatcgattatcagaatgcacaaggagatcagtctaacttgcagacgatttctcagtcgcttattgaagataatgatgtcatgttagctatcgcaaccccagcagcccagtctttgagtagtttgacaaaggacaagccaattctctttacagctgttacagatccagtttcagctaaattggttaagtctatggacaatgttggaggaaatgtgacagggacaagcgacatgtcaccaatcaacaaacaagtcgagttgttgaaaaaggtccttccaaacactaaaaaagttgggattatgtacacgaccagcgagcgtaactcagaagttcaggttgaagaagccaagaaatacttcaaggaagctggtattgaaacggttatcaaaggaatttcatcaaccaatgatatccaagatacagccaagagcttgatgagtcagaccgaagtcatcttcatcccaactgacaataccattgttagtgctattaataccttggtagatctttctaaagagactaaggttccagttgttggtagtgacgctggtagtgtagaaaaaggtgtcctgttcacttatggaactaactatgaagcgcttggacgtcaaacaggtaagttggcaggccgtgttctccgaggtgagaaggtcaaggatgtcgatgcagagtatcctaaaacacttaatgttgtggtaaaccatgacatggctaaagaacttggcattgatgtttctagcattagtgacgaggaatctaaagcatcaacgcaagatgacaaaccaattgctaaaaaagataagggtgtcattaagcttaaggtcaataagtcttctaaaaaaggattttcaaatgtggtgctaacagccatctctcagggacttctctgggctattatggctattggggtcttcattaccttccgtattttggaccttgctgatttgacagctgagggggccttcccacttggtgctgctacgacaactatcatgattatccgtggaatcaacccaatctttgcgactctaggtggttttgttgctggtatgcttgccggagcggtgtctggctttatgcatacgaaaatgaagataccagcacttttaacggggatcattaccttaacagggctctattcagttaaccttttggttcttggaagtgccaatgtctctctttcaggacacaatacgcttgtgactatggtgatggatcttggtctatctaagctgaatggtgtgattctattaggactgatttttgttagtctggtagtacttatgttggttgttctccttaatacacaggttggacttgctcttcgtgcaacaggtgataaccttgccatgggtgaagccaatggtatcaaggttgaccgtatgaagattcttggctacatgatttccaatggtttgattgccctatcaggtgccctcctagctcaaaacaatggctatgcggatatgaatatgggtactggtacaatcgtaaatggcttggctgcaatcatcttggctgaggttatcgtcaagtatctaccacttggcaaacgcctctggtcaattgtcgtaggagctgttctctaccgtttggtcttggttattatccttgccatgaacgttgatgctcaaatgttgaaattggcttcagccatcttgcttgctatcatcctttatgtgccagaagtacgacaaaaactgaaaatcagacctaacaaatccttgactccaggaggtgacaagtaatggctttacttagtttacaacagattcataaaacctttgaaaaaggcacggtcaatgaaaatcacgtccttcgtggtttggatctcgacattgaacagggagattttatctctgttattgggggaaatggtgctggtaaatcaaccttgatgaattcaattgctggtgttcttagcattgatgagggggatatcttgttggaggggcaatctattaagaaagcatctgtagatgagcgctctaaagacattagccgtgttttccaagatcctcgaatggggacagcgacaaacctttctatcgaagaaaatatggcgattgcctatcgtcgtggtaagaaacgtagcttttttaaaaagtctatcactgaaagcgaacgtcaagtcttcaaggaagccttggtagatcttggtcttggtcttgagaatcgtatgaagaccgatgctaatttcttgtcaggtggacaacgtcaggccttgacacttgctatggcaaccttggttcgtccaaaaatcttgcttttggatgaacatacagcagcactagatcctaagacaagtgacatggtcatgaatttgacacgtaagattgttgaagaacaagaattgacaacccttatgattacccataatatggaacatgctatcgaatatgggaaccgtctggtcatgctctatcatggtaaaatcgtcgtcgatgtgcgaggtgaagaaaagaaaaatctcactgttgcagaacttatggacctcttccacaaaaatagtggacaagtcctcaatgatgatgccttggtgctcggttaacaaacaaaaaaagaaactatccaaagttcaggttttgggtagttttttcttgactatttttgaccaagtgctaaaataaatatatggattagcactcatggtttatgagtgctaaaaataacgtttcacacgttactaataataaataacatttggaggtaattggtatggcattgaaaccattgggtgatcgtatcgttgtccgttttgaagaaacagaagaaaaaacagctagtggctttgtattggcaggagctagtcatgaagctacaaagactgctgaggttttggcagtaggtgaaggaatccgtactcttactggtgaattgattgcacctagtgttgcagcaggcgataaagtccttgttgaaaatggtgcaggtgtcaatgttaaagacggagatgattccgtttcaattatccgtgaagcagatattttagcagtactagcttaggtctatgctaatcagatataaactaagataaagaaggagtaactatggcaaaagatattaagttttcatcagatgcacgcgcagcaatggtccgtggtgttgatactttggctgatacagttaaggtaacgcttggtcctaaaggtcgtaacgtggttttggaaaaagcttttggctcacctcttatcactaatgatggtgtgacaattgctaaagaaattgaactcgaagatcactttgaaaatatgggtgctaagctcgtcagcgaagtggcttcaaaaacgaatgatattgccggtgacggaacaacgacagctactgttttgacacaggctatcgtccgtgaaggtcttaaaaatgtaacggctggtgctaatccaatcggtatccgtcgtgggattgaagcagctgtagctacagctgtggaagagcttaaagccattgctcaaccagttgctaataaagaagctattgcccaagtcgcagcggtatcatctcgttctgaaaaagttggtgaatacatttcagaagctatggaacgtgtgggtaatgacggtgttatcactattgaagagtctcgtggtatggagacagaactcgaagtggttgaaggtatgcagtttgaccgtggttatctttctcagtacatggttactgataatgaaaaaatggtcgctgaccttgaaaatccatttatccttgtgactgacaagaaaatttcaaatattcaggatgtccttccactcttggaagaagtgcttaagacaagccgtccactcttgatcattgctgatgatgtggatggtgaagctcttcctacacttgttcttaacaagattcgtggaactttcaatgtcgttgctgttaaggcacctggctttggtgaccgtcgtaaagcgatgttggaagacattgccgtattgacaggagcaactgtcattactgaagatcttggtcttgaacttaaggatgcaactatggcagcacttggtcaagcttcgaaagtaactgtggataaagatagcacagttatcgttgaaggtgcaggaagcacagaagcgattgctaaccgtgttaacctcatcaagtctcaattggaaacaacaacatctgaatttgaccgtgaaaaacttcaagaacgtttggctaaattgtcaggtggggttgcagttgttaaggttggtgcggccactgaaacagcccttaaagaaatgaaacttcgtatcgaagatgcccttaacgctactcgtgccgctgttgaagaaggtatcgtagcaggtggtggtacagcccttgttaacgtcattgctaaggttgctgaacttgatcttgaaggtgacgacgctacaggacgtaacattgtcctccgtgccttggaagaaccagttcgtcaaattgcttataacgctggttatgaaggttcagttatcatcgataaattgaagaacagcccagttggtacaggctttaacgctgctaacggtgaatgggtagatatggttgaagcaggaattatcgatcctgttaaggtcacacgttctgccctccaaaatgctgcttctgtagctagtcttatcttgacaactgaagcagtcgttgccaataaacctgaaccagaaactccagcagcaccagctatggatccaggaatgatgggctactaagagtttaaaaaagcaaaagaaaaaacctaggaaaagtcgagaaactttttctgggttttctttttttcaattatttgttgttaattactgaaaagggttaaatgtatcagaacttccttgttgacctgccatttgcatcatcatttgttgttgtctaatgcgttctgcttccttattcgtattgatagaaacagcaagaaggatgatccaaccgatgaatgtccagtctagaagaaaggataggataaagattggccattttttatctgttttatttagaagagctggtaatataagaagtactaccaaggggaaattaatgatgacggagagaagagccgtgatcaatccggcactaagatcatcactggcaattcccaagagtatcattccaagagcccagaggatagctgggatggaagcgacggctaacatgatgaggtttgtttgggttttcttgtcttgtttcttccaagtatcatttagatttttgcttgcttgttggaaagtttcaccagttggattcgcaaattggttaacagtctgactggccgtttctacagcaggtttaacttgttcctggaaggtctttgattgattttcttgagctaggttagttgcttggaaagtctcttcttcatctgctgtagagttagtgagtggctcttcagcaacatcatagctgtcaacatcattttcggcagtttctaccacttctgttgatggtgcagattctgctggttcaacaacttctgaatcttgcttagtttctacagtctctttttgtgagacagtttctgttacttcgacagtttgtttgggagtttctcggacaaactcgcctttctgagctgcttcagccatttcttgaatacttggattacgaccattaactgcttggaaaaaatcgatccaatcttgttgcttcatgtgtataacctccagatatcttgattaaaaaatgttgataattacaattatagcaatagtgtaaggggaccgcaatgggagtctttactttatttccttataatcttcttatcactaaagatgggaaagagaaagaaataggttaggatatagaccactagaggatatatcagtggattatagtcccaggctccttgccaatctaggtgtaagagtctaacactagcgcgtgttaggcctgtgctccaagctttaaggccaaatggttttaggattaaactgagtggtgttggaagatgcaaaaggtagactccataaactgccactaaaactaagagatataatctaaaaaaacgctggtggtaggcccacaagcgtgtaaaatagtttttcattagccaataactgcaaagagtttttgagcgtttgattggcgagtagcatccatgatgaggaataagtcaacaattgaccagataccacatccaccacacgtcaaaagtttaccaacaccgagaccaatttgtcctaacaaaaagcggtcaattccaagagtcccacctagaagtgaaataatcaacaacattgttggatcttggaagctgattgagtaaagcattgaaagttgttgctcaggaagtgcttcaagacgttgacggatgtactgaacttgttctgttgggaaatacttggcgttaatggttatccattgatcgactggattcataaattaaatacccctcaaattttaaatgatatgtaaaggataacatattgtaaagggagattcaaggcggttaaggcttttgaagtcaataaaagcaacttatttgcaagcttccactgtgtcataactagaggatcattaggataatcctttcgcactatgcttgagaatgagcctacttctattatttgtgatttctcaacccttgttcaaaactgtctgagctcgccttaacagtgattttgtcgagtgttaagggatgggtgaaactaagggtgtgagcgtggagcatgagtcgagatgcggggcggtggctataaagagggtcccccagaatggcatgcccatggtgggccagatgcacacgaatttgatgggttcggccggtttttagttgacagttgaccagactagctcctttgaagactttgaggcgcgtgatggttgtataggcaacctgcccttttctaggatcaaccacccgttttctacggtcatgtcggtcgcgtccaatcttgtctttgtatacagtctccttggtctggaatttaccttcggccaaagcccagtattgacgctgaatcttcttatcttccaagagtcgattgagaatagggagaataaacggattttttgcgaaaagcacagctccactagtttctatgtctagtcgatgaacgacgtaacaggtttgcccacaataggccgaaacatggttaagtagagcaatttctgtgggttcattaccatgcgtcttcattccttcaggcttattgaccacgatgagatgctgatcctcataaagaggctctaccagactggcatttcccatagggataattttttcagggtagtcctctgtatcaaaggtcaggttaatcttatcacctttttcaacaggactctgccaattaatagtctttccattgatgaggacgtgctttttcgtacgtaggaaatgacgaatcttacgaggaatgaggagcttagtttctagtaagtctttgacagttgttgcaggatggggattgataatttctacgtgtaaagtcatggtttcattatatcatgaacgtttaaaagaggacagaatctgtaaaaacttggtataatggggttatgacattttttgataatctaaaaaacaaactttttaaagaagaaaatagcggaaagggtaaggattcccagcctgctgaaaaatcgaagaatttacaaaataagataaagggactctttgctaagaaacctgatgaggttgaacaagctgttgaagacctagatatgtctcaggaaagtcaagagacgtcacgttatcaacgttctaagcaaaagaaacctattgatacgaccaaacctttaggtaaggttcaggcgttcttgagcaagtttacactttcgccaagaaatcctattcgtcgtttctggcgtcgttatcatattggtaaaattctctttatcttggtagctatgctggttttgacagttggttcctatcttttctatattgccaagacgaccaatgtttcagatcttcaagatgccttgaaagctacgacggttatttatgacaaagaaggcaatcaagctggttctttgtcagggcaaaaagggacctatgtggagctggatgccattagtgatagcctagagaacgctgttatagcaactgaggaccgtaccttctatgaaaatagcggggttaacgtcaagcgattcctcttggccattgtatctatgggacgctttggtggtggttcgaccattacccaacagttggctaaaaatgccttcttgacacaagaacagacagtcactcgtaaggccaaggaattcttcctctctttggaattaaccaagaaatacagcaagcaagaaatccttaccatgtacctcaataatgcctacttcggaaatggggtttggggtgttgaagatgctagtcaaaaatacttcgggacaagtgctgccaatctaaccgttgatgaagcagcgaccctcgctggtatgcttaagggacctgaaatttacaacccaattgataatatcaaaaatgcgaccaaccgtagaaacactgtcctcgccaacatggttgatgacaagaagttgagtcaggcagacgccgacagtgcggcaggagttgatatggctagtcgcctggatgatacctatcaagggactggcgatgactacaagtatccgtcttacttcgatgccgtcattgaagaagctacaaaaacttatggcttgagtgaggatgaaatcgttaaaaatggctacaaaatctacacagagatggatgccaactcacaagctaacatgcagcaaacctacgaaaatacctatctcttccctacatcagaaagtgatggtagtacagctcagtcagctagtgtggcacttgatccaacaactggagctgtccgtggtctggtaggtcgtgtaggtggtaccagtgatacaaccttccgtaactttaactatgcaacccaagggaagcgtagtcctggttcgaccatcaaacctttagtggtctatgccccagctctggcttcaggatggagcatcaataaggaccttccgaataaaccaatcgactataatggctataccccaaccaactacggtggtgttgagacagaggatgtgcccatgtatcaagctttggccaactcctacaatatcccagcagtttacctctttaaccaaatcggtattcaaaaagggattagttacggtcaaaaattcggtcttaactttgacaatgttccagaagaactgggaatttcacttggtggtggtgtgacagccagtcctcttcaaatggctcaggcatatgcgacctttgctaatggtggtgagatgaacacagcttatttcattactaaaattgaaaatgccagtggtgacattattgctacccatagtaagaagtctaaacgtgttatcagccagtcagtagctaaccagatgaccagcatgatgcttggtaccttctcaaatggttctgctgtgaatgccaactacacaggttatactatggcaggtaagacaggaactgttcaggctgaatttaacaaggatttgactagtgaccagtgggtgattggttatactcctgatgtggttatgacgacctggatcggttttgataagactgacgagagtcactacctaacaggagctagctcgggaacagcctcgacgatttttagctacattgctgcggatgttttgccaaatacaccaggtactgagtttaccgttgaaaatgcctatgcagctgatggtcaaacactagactatacggcagatccaaatgactcgcgcaatagcagtaacaagtcatggacagacaaggcatcagacgttgtgaatgacgttaaagatcaggcaagcagcctttgggataagattacagactccttctcaggtctattcagatagcttgtcaattgcatttaaaagtggtaagataaaaagaacggaggcgttatggcacagaaaaaagcaagcctagcgtgtgctgaatgcgggagccgaaactactcaattaatgtgagtagcactcccaaaccaacacgactagaagttaacaaattttgtaaacattgtaaaaaatacaccttgcataaggaaacaagataggagacaccgtgagacaaactggaagtattttcaaagtcttgaaagacacgacttggccagaccgtaaacaacgctggcacgattttatttcagttcttgagtatactgcgttcttcactgtcatcatctatgcgtttgatgaattgttgagtcgcgctatgtcagcactgattaactttttctaaagaaaacacaaaaagagtgggaatgcctgctcttttttgttataataaatgcagataaaagcgagaacaagggccaccaggcttttttattacgctttgaattaaaccatagacattcattgacatttaacactcgaagctagaagatagctagccgaaggtgtttaaatgtcatttagaaaaaagaaaggaatcctaaaatgctagattcattcgacaagggctggttcgtccttcaaacctattcaggatacgaaaacaaagttaaagaaaaccttttgcaacgtgcccaaacttataacatgcttgaaaatatcttgcgtgttgaaattccaactcaaactgttaatgttgagaaaaacggtaaagttaaagaagtggaagaaaaccgcttccctggttacgttcttgttgagatggtgatgacagacgaagcatggttcgttgttcgtaatactccgaacgttactggtttcgttggttctcacggtaaccgttctaaaccaacaccacttttggaagaagaaatccgtcaaatcttgatttcaatgggtcaaaccgttgatgtctttgatactaatatcaaggttggtgacgtggttcaaatcatcgatggtgcctttatgggtcaagaaggccgtgttgtagaaattgaaaacaacaaggttaaaatcatgattaatatgtttggttcagaaaccgctgctgaacttgaactttaccaaatcgctgaactttaagatagacaaaaagaggttggactaagagacttcaaccttggaagactatctcattaaacttgaggggagaggctagatgctagatttttgaaatttagttctgtgtcactccctttttttctaacggatgatgatgaattacaaacgattttacgataggattagcgctcctttgcgtttttacgctaaggttttagaagggttgaacaagcttataactaggactttttacctgctttttcctatatttcttatttgggtttggctaaggaatggttggtttgttctctctacgacggtgcttattatggggggaggctttttccttctttctcttggtcgtagcctctacaatcgaccgcgtccataccagacctgggctattcaaccccttattaagaaggacagtctgggtaagtcctttcccagtcggcatgttttctcagcgactgtcattgctatgttggcactgatgcttaacccctggctaggtggggctatgctttttctggcgggggctctagcttttttgcgcgtgctaggtggtgttcactatcctagtgatgttttggcaggctatgccattgggattcttgtaggtctccttctttatctttagaaaatttgggtcttcttcgagagaggaaggctttttgcgttgaaaaaggaaaggcacctctagggcacctttccttttgttctaaaattcgagttggcaattaaaggctgttcccaccattagatattagcttagtttaggacatgttctctaatagcttgagcgactccatgctcatcatttgaagccgttactaagtttgcagtttccttaaccccttcaggtgcattgcccatagcaattcctagaccagccagagctagcataggactatcgttgaagttatctccgatagtcatgacttgttcaagaggaaggtcataatatttggcaacttcaaggagagcgtgttctttagaaacatgtttggcagtgacttctaagtagttatctttggataagtagaaggctgtctgtggaaaatccatgcttaggagtttttggtggaggtcctggataacttcaggctcatcaatcaacaatagcttgtggataggtggttctgagtctgagaccgtgtcttgtagttccttcatgataggagattcacccgtgatacttccttccaactgagaccatttgtctagttcgttggtaatccagtccttgccagagtagatattcacagagacacttggataatctgtggataagtagctaagaagttcttgaatctcagatttatccacagggtgctgtatgatagtacgatcaccctcaagtactagggcaccgttgtagcaggcgataggattgtcatgaagtcccagtttatgagcaattggttgcatccctagtggcgaacgggcagaagctaaaacaaagggaatatttgccttttcaagctctgtcattacctcaatcagttgctcatccacctggtggttactagtgagaatggtgccatcaatgtcactgataatcaaacgaatattactcatagtcgctatcctttccatcgtataaaatcgttactttatctttaagagactcgaccaaatcaggatctggttccttatctgtaatccagtagtcaaagtcttcaatcttgcccaagatatatttggagtgcttttcatatttatcagattcagcaataagtatcttggttcgagcagcttgcatggctagttgtttgacagcaacgtcctcttcatcttcatagctgaccactccttgactgagactagccgctccgaagaaggctaagtcaaactgtagatgttgcaagagctgggcttcgtgaagcgaatagtagaagcggtttttgctgtaaaatcttcctcccaagagatgaaagtcgattccttctttaccgcttaggaccaaggcattgtccaaagagtgggagtagacagtgaccttcttagtcaatttttgtgagacttcaagcatcaaggtagagacatcgaagaagagtagagattggtctttgaccaagctaagcgctaggtctgccatttttttcttgtcttcagtgagtcctttctgacgttcctggaagccaagaacagtggtattttttactgggagaatgccaccatgggtacgctgagccagattcctctggctgaggcagtcgaaatctcttctgacggtatctttggaaacacctaatgcgtcaaccatttccttgacagataggtttccgcgctcctccaaaagtgttaatattttctctaatcgttgttcctgatacatgagtcacctactttctgatactagtatagcatctttttgcttttttgttacataaaagcgcaaaaaaacttaaaaagaatgaaaaaagtgcaaaatagattaaggtgaatttgccttttaaagttcctttatcatctttaaaaatccttcaaaaatgctataatagaagcattacgaatattggagagaaaccatgagtttttacaatcataaagaaatcgagtctaagtggcaaaaatactgggctgacaatcacacttttaagacaggaacagatgcctctaaacctaagttttatgcgcttgacatgttcccttacccatctggagcgggtcttcacgtaggacacccagaaggctatacagcgactgatattctcagccgtttcaaacgtgcgcaaggctacaatgtccttcacccaatgggatgggatgcctttggtttgcctgcagagcaatacgctatggatacaggaaatgacccagcagaattcacagcagaaaacattgccaacttcaaacgccaaatcaatgcgcttggcttctcttacgactgggaccgtgaagtcaatactacagatccgaactactacaagtggacacaatggatcttcactaagctttacgaaaaaggcttggcttatgaagctgaagtaccagtaaactgggttgaagaattgggaacagctatcgccaacgaagaagttcttcctgatggaacgtctgagcgtggaggctatccagttgtccgcaaaccaatgcgccaatggatgctcaaaatcactgcctatgctgagcgcttgctcaatgacttggatgatcttgattggccagagtctatcaaggacatgcaacgcaactggattggtaaatcaactggtgccaatgtcactttcaaagtaaaagggacagacaaggaattcaccgtctttacgacacgtccagatactctttttggtgcgaccttcactgttttggctcctgagcatgacttggtagatgctatcacaacacctgaacaagctgaggctgtagctgattacaaacatcaagctagccttaaatcagacttggcccgtacagaccttgctaaggaaaaaacaggagtttggactggtgcttatgccgtcaaccctgtcaatggtaaagaaatcccaatctggattgcggactatgttcttgccagctacggaacaggtgctgttatggccgtacctgcccacgatgagcgtgactgggaatttgcaaaacagtttgaccttccaatcgtagaagtcttggaaggtggaaacgttgaagaggctgcttatacagaagatggccttcacgtcaactctgacttcttgaacggtctcaacaaagaagaagcgattgctaaaatcgtggcttggttggaagaaaaaggctttggtcaagaaaaaatcacttaccgtcttcgtgactggctctttagccgtcaacgttactggggtgaaccaatcccaattattcattgggaagatggtacttcaacagctgttccagaaagtgaactcccacttgtcttgccagtaaccaaggacattcgcccttcaggtactggtgaaagcccattggctaacttgacagactggcttgaagtgactcgtgaggatggtgtcaaaggtcgtcgtgagacgaatactatgccacaatgggcaggctcaagctggtactacctccgctatatcgatccacacaacactgagaaattggctgatgaggaccttctcaaacaatggttgccagtagatatctatgtgggtggtgcagaacacgccgtgctccacttgctttacgctcgtttctggcataaattcctctatgaccttggtgttgtaccgactaaagagccattccaaaaactctttaaccaaggaatgatcttgggaacaagctaccgtgatcaccgtggagctcttgtggcaactgacaaggttgaaaaacgtgatggttcattcttccatgtggaaacaggagaagaattggagcaagcaccagccaagatgtctaaatccctcaagaacgttgtcaacccagacgatgtggtggaacaatacggtgctgacacccttcgtgtctatgaaatgttcatgggaccactcgatgcttcaatcgcttggtctgaagaaggattggaaggaagccgtaaattccttgaccgtgtttaccgtttgattacaagtaaagaaatcgttgcggaaaacaatggcgctcttgacaaggtttataacgaaactgttaaatctgttactgagcaaatcgagtctatgaaattcaacacagccattgctcagctcatggtctttgttaatgctgctaacaaggaagataaactctatgtggattacgccaaaggatttatccaattgattgctccatttgcgcctcacttggcagaagaactctggcaaacagtcgcagaaacaggtgagtctatctcttatgtagcttggccaacatgggatgaaagcaaattggttgaagacgaaatcgaaatcgtcgttcaaatcaaaggtaaagtccgtgccaaactcatggttgctaaagacctttcacgtgaagagttgcaagaagtagcacttgctaacgaaaaagtcaaagcagagattgatggcaaggaaatcgttaaagtgattgcggtacctaataaactcgttaatatcgttgtgaaataaaaataaatccttcggagcttagctctggaggattttttaggttcagcttgacaagaaatagtagttttgttaatgttattaacaaaaagagggacactatgaataagaaagaactgcataagtttaataatcgttttaacagttttgttttagcctttgaacagttgaaaaaggatcaacatcggaacagtattgataaatcaatcactattaatgaagtccatttgattgatctaataggccgcaatcagcctgtgaatctagtgacattatctgagttacttgaagtatctaggagtgctattactcagagtgttagacgtttaatcaagaaagacctcgtttcttttgaatttgcaccagataatgaaaaaaataaatatctgatattatccaaaaaaggggttgacgtttttaacattcataaagagcagcaagaacatattgagacagccattttttcagttttaaaaaactatagtgatgaggaccttcaaatggttatgaaattgatggatgatgttgaaaaggtatggcaagaattaccgtggtaaaaatcacggtaattttaaaactatattgttaattgtattaacaaaaaagaggaagatatgaatataaaaattgaactgatctcagagcctgatttagcagacgaatcttttaatattgtcatcgatggcttaaaaccaagagagatctatcgagtcgaaatgtttctatccgattattattgtatcaatgctcccatgctattagctcatgatattttatggaaatcaacagcgacttttgtatcagataagaatggtattattgatatttcacaaactccatcttgttctggctcttatgaagatattgcaacaatggggttattctttaatgccaagcccttgaccaataggaaaaagaaacttccaaactctctttctaaaattcccttattagatcacttttttgtggaaatcaaaattatacaagataatactgtcgttgcagagagaactttcacaagacattacatgcgttcgcaaattagtcatcaagatatttacgggaaacattttcaagggagagtcttttatgataaaaaggcaataaaagcaccagcattgattattgtgagcggtagtgaaggaaggattgaaaaggcacagaatatagcgcagcttttatcttctagaggttatatttgtctagcagttgcctactttggtttagaggggttgccaaaacatttggaacgtattcctttagagtgccttgtggaagcaaaggattatctacgtcagcatcctcaagtagatagtgaaagaattggaatctatggacggtctaagggagcagagttagttttagctgaggagagcatttttaatgacgttcaatgtttggtactaaattcaccctctgatgtggtgtatgaagggataaaaggaaaatggaactcccatacttcttcttggacgtatttgcaaaaagaacttccttatcaaaagtttcgacttagagattatctgttcagcaaacttttaaaaaaatccttccctaatgattgctctgctaggatagatattggtcaaatgtattcaccaatcttactactcggaagtactgttgatgaaatatgggatgcctcgtcagcaattgatgatattgtctcacattataaaggacaccacattacatttaaaaaataccatgaaacaggtcacatgttgacagtggctcatcaacccaatcatcgctatcgaaaagattggcgtttactgatgaaagagagcaaggattcttggttggctacgcttcatttttttgataggcatttgaagaagcaataacataagattataaatatgctataatagtcccaactaagataaaaacacagttctggttggtagtccagacgtaggcaagcctatcagtaaccttcctccttggttgtccattcttagggatagatttaaggaggtgctgtcgtggaaacaatttcaattggattgacagtttattttgaagatggtttttggcatggtttgttcgaacaagtgtatcgagaaacttataaagtttgtcgtgtgacatttggtcaggagccaaaagatgatgaaattctagagattttacagactcagtttactcagttatcttttagtccagaagctatagttaagcaacatgtaaaaatcaagaatcctaaacgattacagcgagctgtgaagaaacaagtaaagcagaaagtttcttctaagtcgaaagaactattgcagttgcagtatgaggcaaggaaaaagatttcaaaacatcaatctagtgtcaaaaaacaattgctcaaacaagagaaatttgaacgtaaacagcaaaaacgaagagagaagcataaaggacattaatgtgtttctctttatagaaacagctcttttctaaatagaaaggagctgttttactagtattgaagaatagatttcaactatttcctaatctagtgacttatcatcaaaagttttactgatgatagtttcaaattctggacaatacttacttgcctcaaattcaatgatttcatattgagcaatctcattttgatagaatggatcgtgtgtaatgattttttgaacagcttctttatttttagctctcacgagaatgataccaccggttcttggatttttccttccagatgcaataaaaagaccttttgtataatactgatttaaaaaatctatgtgtttttctaagtatttttcaactgcatcaaggggcttaatataggtaagatttacaataaacataagtgactcctttaaaatgaatgataaatagattataatactctacaaacaaattgaatagtaggcacatttttgtaaggagaaaaaatgttaacaaataaaaactggaattgcagtatgtctcgggtcttagatgtggttggtgggaaatggagaatgaatatattatgggttataaacaagcataagaaagttcgtttcaatcaattgagaagagaagttgaagggattacaactatcagtttgacacgtggactagatgttttaatagagaaccaattggttgagaaatatgattttgaaactatgccactccatacagaatatgggctgacagaaaaaggcaagtcactgatgccgattttaaaggacttgaatcaatggggaaaagaatggctgcaataaattttctcctcattttaatctcttccgtatcgccacttagctcttcattttgaccacttatcccccaaagccgttttttaaacggcttttttgctagactggttctatcaaaaggagagagaacatgatattacaagctaaaaacataagcaaacggtatgggaaccaccttgctgttgataatattcaattacaatttaaaagagggaccttcaatgcgattctaggaccaaatggggcggggaaatcaacgacgatttccatgttgattggtttgaaacaaccaacgcaaggtgacatcatctatgaaccaggtactaaaattggtgtggtcttccaaaccagtgttttagatgagatgctgacggttagggaaaatctggccattcgtgccagacagtataaaggactgaaacccaatcgtgtgtctgatctcattggtcggctaggcctatcagctttccaaaagcagagatacgggacgctttcaggtggccaaaagcgtcgggttgacattgcgcgtgctctactctcacaaccagatattctgttcttagatgagccaacgacaggtttagatatccaaactcggaagtctatttgggatttgctctatcaattgcagagagaagagggaatgaccgttgtactgaccacgcattatcttgacgaagcagatgaagctgatcagatttatattgtggaccatgggaaagtgattgctcagggatcggcattagatattaagagccagtatgcaaaaaacatcttgaagattcgtttcaaggagatagagcagatagaaagtcttaaaacttcgggaatgtcagtagagcaacaaagtcaactggagtatgtttttcaacctgagagtgaaagggaagccattgattacctggcacaagttagagatagaatagcccattttgagtttcgtccagggaccatggatgatgcctttattgcacttacaggaagggaggttcgttaatgctagccttactaaagcgaaattttttattgtacttcaggaatcgttcaggagttttcttctccttgttgggagccttgatttcctttattctctatattatttttcttcaaaaaaatctaacagatgcttggaatcagctccccaatagtggtcctttgttaaataattggttgatgagcgggacgctggctgtgacagggataacgacgagtctggctgccctgactcagttggtaaaggaccgcgaatatcaagtagatcaggatctttatttatcgaatcatgggaaatggcggttaccattttcgtatctagcgagtgcaatcatcatttcttttgccatgcaggtccttatgtatgtgctgatgtgtagctattttagagaagtgccaaaattatacatactacccgaacttctcctaattatgatgcttagtagcctgctttctagcttagtgaatgccatttttgtttactttttccaatccgtagacagtcttggaaagtttgcgaccatagtggggacagcttctggttttttggtaggaacttatgtacctttgggcgttctacctgattttgcacaactactaatgaaatgtactccagcaacttatattgctgcactttatcggcaagtcctcatgaaagaaacattaagtgagacctttaaaggtcaagataaccttcttcaagagtttcgagaaaaaatgggcgttcagctcaagtggcaagctttgttgacaaaggaaaatacttaccttatagtgttaggaggtattcttctagcaagtattctttggattattttagtgaaaagaactagtcagaaaaaataagtgagagttggaataggaatgaagcttcgttttgaagaaaaatcagatatttcggcaaaggatccctgtgtggtcatccaagcagagcgattgtctgatcaagcacgagaggtaatggattatctcgaacaattttcagttgtaaatcaagtggtgattcctattaaaacggatgatcatttggttatggtaaaaattgatgacattatcctagctgagattgataagaatgtgttgacgatttatactgtaaacaatacctatacgatgagagagacactgacaaactttcagcatcgcatcaatcgtcgaagttttttacagatatcacgtcatgctgttatgaatatagaccatttggaatccctatcggatagtttttctggcaatatgatggctaaaatgacaggtggagttaagtccagtgtcagccgaaaatatgtcaaatctttgatggattatttaggggtctaggaggaaccaatgaaacgtttaattgcttattttgtatccggcgtgagaacgggatcgttcttttaccttgcattccttttacttggtcaattatttccccagcttatctatcccaaagttaatgtaggaaatattttagccctctttatgatgagcggtttgatgggaatgctctcgtggattttggaagagcttgaccgtatgtcgtataggcttagaataatcttgcatttcttgttgacggcgattgtacttacagtgacttgtctgatatcaggctggtatgaggctttaacgaaccctgctatctggattgttttcattttcgtttatagtattatctggctatatctcatttggcaaatgcatatgagaacacagcgtattaatcaagctttactgcatcgtcgaagccagaaaaagaaacaaaagtaataaattatagtaaacttcaaaaaaatactctttttcctcttgaccctcacgccacgtcatagcctatactcttaattagagaggagttctaatgaaatctgtaaaagaagtgagccaactatcaggtgtcagtgtgcgcacccttcattattatgacgaaattgatttgctgaaaccgtcggttgtggctgaaaatggttaccgttactataatcgcgatgcggttgtccgtttgcaagaaatattgctttaccgtgagttagactttcctctcaaaaaaattaaggaaatcgtaggtcaaccaggttatgacaaagttcaggcgcttagggatcagattaagctcttagagctgaaaaagtcccgtttagaagccgtcatagctcatgccaaggccttacaaatggaggaagaagaaatgtcatttgaagcatttgatcaaaaagctgtggaagcctttcaggaagaagctcaggctagatggggtcagacagaagcttatcaagctttcgcggctaagggagatgaatccttccctgaagttacaaaagagatgactgcaatcatgtctacctttggacagctcaaggagtataatcctggtgatgatagtgttcaggagcaagtaaaggcgttacaagattatattagtcagcatttttatccatgtgaccaaacggtattagctggtctcggtcagatgtatcaaacagataatcgcttttctagttttattgataaagttggaggagcagggactgccacttttctcgcagaagctattcgtatttattgtcaataaactaaagccaaagtcttagggactttggcttttttcatgccatagtgacatttatgtcactatttttataatcatttaatgattataattaatgtatcgttttagaaggcgattagttaacggtttttgttattttgcttgaaaatttcttgcaggtaatcagatagaaactaatcaaattctaatctaaaccaaatttacggaggaactcatgtccattttaaccatcgaccacatctcaaagtactataatctcgacggtacgaaccaagagcgcgctttgaacgatgttacacttgagattgcaccaggaaagatcactgctatctacggtccatctggctgtggtaagaccagtctgcttagtattattagtggtctggatagtcagtatcaaggaaatctttatttcaaaaatcaaaacatgcgagatttttcagagcgtgacttgacctattttagaaaggctcacattggctttgtctttcaaaatttcaatcttatctctcatcaatcagtccttgaaaatgtcaagatgcctctttacgttaaaaatatgactgataaagagatggccgagattgcggaaagggagcttagccgtcttggaatcggagactttatcaagaaaaatgttaagcagctttctggtgggcaaaaacaacgtgtggccattgcccgtgccctagtcaataatccagaaatgattgtggctgatgaaccgacaggttctcttgattctcagtctcaggaaaatgttctcgacatttttaaagagctagccgaggcaggtaaaactgtgattatcgtaacccataaccctgaagtggcggattatgcggatgttgtcattaaaatgaaggatggtgaagtcgttgaaacaatcgaaaaataaggggttgaccctcaagaacaagctcaaattgtcattgaacaactttatggaacgtaagtggcgtaatcttttgattgcgacggcaacttccattggttttatcggtgtcctaatttcctttggtttgggaaatgctattgttggtatgattaatgacagtaccgatggtggcaacattccatcccaaattcagatcagtcttagtgctaaatcagcagccagaggggttctaaatgcggatgatgagaagtttattcgtaatcagattaagagtgatgacattaagtatttggagagtccctttggaatgaatatggcaagtcttacccttgatggcaagaccatggatttcagtaaggaccttcctaactattctcaggttatcagtctttacaagaacacaaaaatctctacatctcgcaatgataaggataaaatttcagctgggaaaccttttaaatctgaagatgaaaatggcttaacccttccgatgagttttgtcaaacgctacaaccaagaaacagggaagaagctcaaggctaaagactttatcggtaaagaaatttcagctcagattgttgaaaatactgctgagggaactaaagtagcggatatcaagactaagattgtccgtattgttgatgacagcgaggatgctgaagagagcaatagctatatgccagctaaacaattggaagaattgctcaaagaaaatggctttaccaaaacagtctcttacatgcttttggagctcaaagatccagccaagactaaggaagtcactaaaaaattgcagaaaaacaagaagtatctggttctttcacagcaggccatcctagatgtcattattaaattcatccgtgtgatccaggccctcttgattatcctttcgtcacaagctatcctagtttcagctgtcatgattggaattatcatttatattaacatcatgcaacgctcaaaagagattggtgttatgaaggctgtcggttatcttaatcgtgacgtgaaagctatctttgtttatgaggccctatggattacgggtatctcactagctcttgccctacttgtatcgcagggcattggaagcttggccaacatgattgtttcacatctctacccaagtgtcagcaaggtgtttgacctaaatttgacatcaattctcatcatgtttggtttctcactcttgatgggctatgtgtcagcctaccttccagcccgtaaaatcagtaaaatggatcctgtcgagtccctaagatatgaatagaaatgaagagtagtctcctcaggctactcttttttgtcaaaacaagcattagaaaattcagaaaatccaaacaataattaactttctgaaaagtggagacaattgctcaaaaatgctataatagtcagcatatacaggctattaatgacaaaaaaagaagtacctattcgataggaggaattccatgtataaagatgacagtttaaccttgcacactgacttgtatcaaatcaatatgatgcaggtttactttaaccaaggtattcacaataaaaaggccgtttttgaagtttatttccgtcaacttccgtttaaaaatggctttgctgtattcgcaggtctggagcgtattgtcaactatcttgaaaatctgaccttctcagaaactgatattgcttatctaaaagatttaggttatcctgaggattttctggactatctagccaacctaaaactcgagttgactatcaattcggcacttgagggtgatttggtatttgctaatgaaccgattttccaagtggaaggtcccttggcccagtgtcagctagtagagactgccttgctaaatatcctcaattaccagattcttattgctaccaaggcagctcgtattcgttctgtcattgaggatgctcctctgttggaatttgggacacgtcgtgcacaagagatggatgcagcaatctggggaacgcgtgcagccgtgattggtggtgctgatgcaacgtcaaatgtacgtgccggcaagatttttggaatcccagtttctgggactcatgcccatgctcttgttcaagcctatggcaatgattatgacgcttttaaagcctatgcatctactcataaggactgtgtattccttgtagacacctatgacacccttaagattggtgttccgaatgctatccgtgtagctaaagagatgggtgataaaatcaatttcttgggtgttcgtcttgattcaggtgacttggcttatctatctaaacaggttcgtaagcaactggatgctgctggttttcctgatgccaagatttacgcttcaaatgaccttgatgaaaacaccatccttaacttgaaaatgcagaaggccaagattgatgtctggggtgtgggtaccaagcttatcactgcctatgaccaaccagccttgggtgctgtctacaagattgtctcaatcgaggattatcaaggagtcatgcatgatactatcaaattgtccaacaatgctgagaaggtttcgaccccaggtaagaagcaagtatggcgcattacaagtcgtgctaagggcaaatcagaaggtgactatatcacctttgcagatacggatgttaatgctttagaagaaattaatatgttccacccaacatatacctacatcaataagactgttcgtgattttgatgcagtgccactcttggtcccaatctacgacaaggggcaactgatttatgaattgccaagtcttgatgaaatcaaggcctatgcgactaaggaattagatgagctttggaatgagtacaagcgcgtgcttaatcctcaagattatccagttgacttggctaaagatgtctgggataacaagatgaccttgattgataatgtccgtaagaaagcccatgacttgtcagagtaaaaggagaaattatgactttgcaagaaactattattgctcaactaggtgttaaacctagcattgatccaaaggaagaaattcgaaaatccgttgattttttgaaggcctatatgctcaaacatccattccttaaaacatatgttttgggaatttcaggaggtcaagattctacattggctggtcgtttggcacaacttgcgattgaagagctccgtgcagagacaggaaaagactatcagtttatcgccattcgtttaccgtacggtgtccaagcagatgaagatgatgcccaacgtgctcttacttttatcaagccggatgtgattcttgcggttaatatcaaagaagctgttgatggtcaggttgctgaacttgccaaggcaggtgtcaccgtttctgacttcaataagggaaatatcaaggcccgtcaacgtatgattacccaatatgcggttgctggtgaaaatagtggggcagttatcgggacagaccacgccgctgaaaaccttacaggctttttcacaaaatttggtgatggtggtgcagatatcttgccactctttcgtctaaacaagcgtcaaggtgcagcccttcttgcagaacttggtgctgacaaggccctatatgaaaaagtgccaacagctgatttggaagaggacaaaccaggaatcgctgatgaagtggcacttggagtgacctatcgtgaaattgatgactaccttgaaggtaaggaagtctcagccaaagctcaggaaacgattgagtcttggtggcgtaaaggtcaacacaaacgtcacttgccaatcactatttttgatgatttttggaaataagaggagaaatgagttatgatcaaagcttatattgatttttggaagcgtgcctttgactttagaggccgttcgactcgtccagactactggtgggcttacttggttaatgtcattattattactattcttactgttttttgtgttcttattcctttcttcagtaatgttgatcttagtgacccagctctgttgaataattcgactgaactgcaaaaaataattattacctatgcttggccactaatgctttttagcttaattgaacttatccctcaattgtctctacaaatccgtcgtttgagagatgcaggatttcatccggcttgggtacttctaagttatataggtcttatacgaatcttggctatcttctcattgattggaagcattgtcctccttatcatgtcttgtcaaccaacgaaaccagcacctgaaacgcagtttgataaagtggaataagattgtcataaccctaggttaaacctagggttatttttaaattgaattttcagaaattagtgataaaatagagaggaataaggcttaaaaggaggaatcttatgacttcactatcaacagatttcacagataaactatttgcagactatgaggccaatgccaagtacagtgctattgagaatgctgtaactcacaatggcttgctcaaatccatcgaaacacgtcagtcagaagttgaaaatgaccatgttttctcaatcgatttgactaaagatgaggtgtctaaccaaaaagcttcaggacgttgctggatgtttgcggcactaaatactttccgtcataaattaatcacagactttaaattggaaagttttgagctttctcaagcccacaccttcttctgggacaagtatgaaaaatcaaactggttcttggagcaaatcattgctacagcagatcaagagattggcagtcgtaaggttaaattccttttggataccccacaacaagatggtggacaatgggatatggtcgtatcactttttgaaaaatatggtgttgtaccaaaatcagtttatccagaatctgtagcttcaagcaatagtcgtgagcttaatcaatacctcaataagcttcttcgtcaagatgctcaaattttacgtgatttgattgctggaggtgctgatcaagctgctgttcaggccaagaaggaagaacttcttcaagaaattttcaattatcttgccatgactcttggtttaccaccacgtcagtttgattttgcctaccgagataaagatgacaactatcaatctgagaaaaatatcacaccacaagctttctttgaaaaatatgtgggtctaaaactcagcgactatgtgtcagtcatcaacgctccaacagctgataaaccttacgggaaatcttatactgttgagatgttgggtaatgttgtaggtgcgccaagtgtgcgttatattaacctcccaatggatcgtttcaaagagcttgccattgcacagatgaaggctggagaaactgtttggtttggttcagatgttggtcaagtctcagatcgccaaaaaggtattcttgcaaccaatgtttatgactttacagctagcatggatattaacttgactcaagacaaggcaggacgtttggactacagtgaatctctcatgactcatgccatggtattgactggggttgacttggatgctgatggcaaacctgttaaatggaaggttgaaaactcttggggagacaaggtcggacaaaagggttactttgtcgcttctgacgcctggatggatgaatacacttatcaaattgttgtccgtaaagacttccttacagctgaagaattagcagcctatgaagcagagccacaagttcttgctccttgggatccaatgggagcccttgcttcaaaataagacaatatatgaaaccactgggaaatgattccagtggtttttcatagcttctttaaaagttatcggtaaaaaaagagttatccattcggataaccctttttatttcttattcttctgctgtagcagtgtttgaatttgaatgttcagagccattagaggccgatgtcgatggatttgttgaagcatcaggaccgtactgttgactatcttgtgaacttgatgagtcactgctttggcttgagtctaaacttgatgatgagctagatgttccaagtgatcctgtgtaaacatttgatgttgaagaaccagtaaggaagacatagctaccattattataaacaccgctaggcatatcgaaatcttcagaacccgcaccatacatctggttaaggtagctacttgttacaccatagatttgtttagcgatatcaaggtctgaaccataaagtggtgttttacggttcttgtaacctgtccaaatcgccattgcatacttagtattgtaaccaacgaaagtttcatccggaaccataaggtcagcatagacaccactttctttttgtactttatagtactcatcgtcaccgtagttagatgtaccagtcttaccagcattgattgtaccaggaacataagcttcagttgctgtaccacctgtcaatacttgtttcaacatacttgacatcatgtaggctgtttgtggtgacatggcttcgacacctttagaatcaaatgatttagttgaaccgtcttcaaacttgattgatttaatgtaagaaggtttatagtaagtaccaccatttgcaaaggctgcataagctgctgccatcttctcacttgatgcaccatacttaggatctgatgatgatgttgaagatgagatggcatttgagtagtacatttctggatactcgatacccaaatctttcaagaaggattgtgcatattccaaaccagcagcttggagagctttaacggctgtaacgttacgtgattgttgaagcgcataagtcaatgaaatgcttccgtaatacttacggtcccagttgtaaactggtgttgaagaacctgggaaattgtaaggattatcgtaaacagtcgtaccagtgtttgtataaacacctttttcaatagcaggagcatagtcagtgattggtttcattgtagaaccccagtcacggtctgtttgaacagcttggttggtaccaagtgcaacgttttcgtcttggtgacgtgatcccaattgggcaacgacacgaccattagtaacatcaataatagtagaagcaacttggagactatcgtttggatagtatacatagtcgttagtattatagacgttccagatatatttttgaatatctggattaaggttagtgtagacatcgagacctgctgagtagatatcagcattggcatcagtagatacttgttcaataacttgtttgatgtagttatctaagtatggctcatagctagctttcttcgtaagtggaagaagtccatcggatacatcagttgctttagcttgctcgtactcttctttggaaatgtttttgtcttcatacatttcagtaagaacagtgttacgacgctctttggcagcatctggattagcataagggtcatattgtgttggtgcctgtgggataccagcaagaagagctgcttgggcaacagagaggtcgctcaagtctttaccgaagtaagatttagctgcggtcttcataccgtagtaaccattccccatataaaccttattaatatagaaggtcaatatttcttgtttagtgaattgacgctccatttggagtgacaaccagatttcttgcgacttacgtttaagggtttggtcagaagtgttagttgagaagtaagccaacttaatcaactgttggtcgagcgtagaccccccttgggtgctgctacgacgaaggttgttaacagctgcccccatgatacggtagacgtcaatcccacggtgtgtgaagaaacgtttatcctcgatagaggtgatggcattaactagagttgttggaatttcatctgttgatgcactctcacgcttctcagctcccaagtcggcaataagactaccattggcgtcgtaaatcttacttgagtttgttgattgcagtttattctctgtaagtttagggacactgctaacatagtaggcaaagaggctaccaccagcgatgacacagactacaaagaaagtgagcagtccaataaatccgtattttgcaatacgccagcccaaactttggtctgaagcggcagagcgttttcctttgctatagcgagaagaatctgaacgtttgaccttgatgtttttagcacgtttagtcaaaccgttaagtgattctttaaagttgctgaaattaaatttagccattatgtgttaccacctaataatttttcaatgatttctaaataaggaacttgaggataagctgcttctgcaattgcatagcctctttttttgatataatcaagaggcattgattttgtccctttatcaatttgataaaaagcgatcaagtctttggcaggcagaaggtaggtttccttaagcgtcgagaagtgaagtagcacgaagcagatcccatcttgactgatgacctgagacatgtgctcaatttgatgcgcatgaaagtttttcataggcatggatgtcttttgtcgtgtctctttggcttcaaaatcaatgtagtatcctttgtaaacaccagagtagtcggtagtagaggcttgtctaaagtaagcttctacaatctttgctcgtgagcgtttgggataatcgactttgacaatttgaacaggagtaggttttttatgaataacggctaaaccacgcgacaaatagtaatcattagtcgcgttaatagcagattcaaagctcatcccccgattggcaaattcaactctatttgattttttaggacgtacctgtgctatcttacgagatatctgatggggatagtttaccatttctttcccttcttctttataagatatgcataaagactattttattataccataaaatgaacgaggaaaacaataaatgacatcactactggtaactggttataagagctttgaactcggtatttttaaagacaaggaccctaaagtaactattatcaagaaagcaattaaacgtgattttaagcgtttcttggatgatggtgtggattggatgatttttaccggcaacctcggttttgaattttgggcactagaagtggccaaagaacttcagcaagactatcctttgaagttagcgacactcttcccttttgaaacgcacggtcagaattggaatgaagcgaatcaaacgaaactagcagcttttaagcaggttgattttgtcaagtatagctttcccgcttaccaatctccagctcagtttaaacaatttaatcagtttctcattgataatacggatcaagcttatttattttatgaacctgaaaatgaaacaaatctgaaatatttttacgatatgatgatagaagcaagtgattatcctgtatcacgtttgacttttgatgacctcaatgaggttatgtcagaataggatttagttgaattttaaacttgcatttttatcattttttctgtatcataaaaacattagacagtaaagtattagtaagttagaaaagacaagtattggagaataataatggctaagattaatttaacgcccaagaaaatctacgaacaagaatttaaaacgagcatgcgtggatacgataaaaaagaagttgatgagtttttagatgacgttatcaaggattacggtgtctacattgctttggttaaggaattgcaagaggaaaatgcaaaactgaaggctaaggcttcatcagcacctacaagtcgcccaacttatgcgagtgcgacaagtgaaccatcacgtgcgaatgctaatgttgcttcggcttcgaactacgatattttaaaacgtatcagtcgtttggaaaaagaggtctttggcaaacaaatcgtcgaataaatctgatttagtgcaatttttggataatcgcatggttgcttgtcttccatgaggaaagtccatgctagcactggctgtgatgccagtagtgtttgtgctaggtgaattaataagcctagggacttgattttcaagttacggcgagcgaactggctaagtcttcggataagttttagtagctctgaaagtgccacagtgacggagtttttagggaaacctagaaagtggaacgcggtaaacccctcaagctagcaacccaaactttggtaggggcatgggatggctggaaacgaacggaccatcctgactgcttagcagtagacagatgattatcgaaggaagtggtacctagtcacttctggaacaaaacatggcttatagaaaattgcatataggtgaggctgggacacatgtctcagccttcttttagcaagaattctctcttttttaactatataaagggacgttgagtaataggccataggttaagaacgtttgtacttataataatgagataaaaggataacaatgaaagaaacatttacattagtagcaactgcagcagcgggtcttgaggctgtggttggacgtgaattgcgtgagttaggttatgatactcaggttgaaaatgggaaggttcgtttccaaggtgatgttcgtgcaattgctgaaaccaacatttggttgagagccgcagaccgtataaagattgtggtgggtgaattcccagcacgcacctttgaagaactctttcagggagtttttgccttggactgggaaaactatcttccactaggtgcaaagtttccgatttcaaaagctaaatgcgttaaatcaaagcttcacaacgagccttctgttcaggcgatttcaaaaaaagccgtcgttaagaaactacagaagtatttccaccgtccagaaggagtacctcttcaagaaacgggtgcagaatttaagattgaagtctcaattttaaaggataaggctacggttttgattgataccactggtgctagtctctttaagcgtggttaccgtacggataaaggtggggcaccgattaaggaaaatatggcggctgctatcctggaacttagtaactggtatccggataaaccgttgattgacccgacttgtggttcagggaccttctgtattgaggctgcaatgattggtatgaacattgcaccaggatttaatcgtgattttgcctttgaagcctggaattgggtggacaaggatttggtacaatcggtacgcgatgaagcagatagtaaggcaaattatgatattgaactagatattatgggttgtgatattgatggccgtatggttgagatcgcaaaagccaatgctcgtgaggctggtcttgaagatgttattaaattgaaacaaatgcgtttacaggacttgaaaacagataaaatcaatggtgtcattatttcaaaccctccttatggtgagcgtttgttggatgacaaggctgtggatatcttgtataatgaaatgggtcaaacttttgcgccacttaaaacttggagcaagtttatcttgaccagcgatgaacaatttgaaagcaaatacggtatgaaagccgataaaaaacgtaagctttataacgggacactccgtgttgatttgtatcaatattttggtgagcgtgttcgccgttctgaggctagaaaggtaaattaaacgtgtcagaagataaaacacaaaatggctatgaaggtagccaagagctagatttccaagatgccaaggaaatgacagtcggtgaggctgtccgcaaagaagctgagattaatgctggtgtaacagaaacagatagcattttggataagtatatcaagcaacaccgcgaagaagttgcctcacaaaaattttcaaagaaaattgaagctgatggcgacacatcacctttggatgcttttattcaaaagcaacgtcaggagtttgcggattcaggtttgattggtcaatcaatggctaatgagtcaatcaactcaacagtagctactgaagaagtaacaccagtcacatttggttttggtgctacagataacaaggttgatgaaactcaatctcatattgacaagcagttgccgaatgctcctgttgaacctgaggttattgcagaaccagaaagtcaaagttctgaagtcatcattacgtcaacgaatgctgatcgtttcatcacgtcagaaacagaaaaatttgacctgggtgatgcactagcagattcagctacttcaactaatcagccagcgccagcctataacgatgcattggtagataatattgatgataacaatcctttgattgctaacatcgatgatccagaaccacaaaatcctgttgttgccaatgttgacgatactgagccgcaagcttcaaaaccattgttggatgatgttgctatctcagacactatcgatttggcggctattgcctcaacagtggcaggggtaactggagcaaaagctgacgaagaaaagacaacaccaaaagtgtctatggcagttaatcgcccatctgcagaagacagaatctcttcagagtctatttcaccatcgcataagagtgcctttgatggtgatattccagtttaccgtcgtaaaggtgttgttatcggtgttctagcagttcttgctttagctattattggtggtagctatgctctttataaaggaacacatagccaatcggcaaaaacaacaagcacagcttcttcagcagtgacgtcaacatcaagcaaggacacggcagctgctgataataaggccttcgaagaaatgtataagaatttcttcacagatgatgagcaaacaaaactcgctaatgatcaatttggtaagctatcagatttggaaaaactgctcaagaaattggagaaaaccaagtattatgatgcagctaagaaaaaatatgataacttgaagaaacaaattgaagctgtacaaaagattaacagtcagtttgagtcagatgctctggtagatggtagctataatgcctctatcgctgttaaatccgatgccaactttaataatctgccagaaagtgtaacaacaactggaaatgcgagtcttgatagcactatccaagaagcgattaagggtggtaagactcagcttgaagaaaaagctaaggctgcgagcgcaacatctgcagcgacagctgctgatagcgccaatactgctagtcctgctgcaccttcaggtgataacacgtctggagcagcttctactggtggtggtgcggctgcatcaaatacatctggagcgcaaaatggagcagctaactcagcaggttcaacaggttcagctggtgcgactggaggaactactggtggctcagctgcagcttcaacagttgtaacacgcggaatcacaaattataacccatcaatccttcaacgtgaccgctcacgtgtgccttataatgcaaacgtagtagcagatacaagtaacccagcttggacttgggctgatggtgttcttgataagattattgaaacatcacactcacgtggttacttctcaggagataacttcatccttgaaccagttaacatcatcaatggtaatggttactacaacttgtaccttccagatggaacttacctcttcagtatcaactgtaagacaggttattatgttggtaatggttcaggtcactcagataaacttgattattaataataatctgcgacactccctagggagtgttttttgttttatcttggtgaaggcctagtttataaggattttgtgctataatagagggataagataggggtgaatactatggcaaaattgatgccgggtagagtccgtaatgagggtattgaactttttgaaaaggatctcattaccattcatcaggtctcagaaactcagttggatacaacagttgaccaacatcatttaatttatgcactcaatgattctgaaatcacgtgtgactgtgattatttcgctcaaaaaggctattgtccccatttggcagcggttgagtattatctaaaaaatgataaagaaggccagcgtctcttggcagaactggaagaggaacaagaatcctctcaaggccaagagcgaggtcactcttttggtggtttatttttagaagggctttccctgaatgaagatgataccgttagatatagcttgatggtagagggagaggaatctacctttggttcagagatttggtggagtatacgtttacgtcgcttaccagatgaacgttcttatgttattcgagatattcctgcctttctcaaacttgtagaggctgagggttattatcagataggtaagaactactatgaacccctatcacttattcaatttgaccaggcttcacaagaatttttagactttctaggacggatgattccagatgaagccaagactaatttagattttattttaccgaataatgcacgtcacctttgtctcccttacggtttttttgaagaaggtttgagacggatgcaagatttggatggctttaggtttgaatgggaaggagccgaatatcgccaacttttggtcgaggatttgactgctgatgctcagctcttctcgtttgatatttgtgtcgagcccaagatgattgaattgactgtcgctgagaagaatagtcaggccttttttaataatcgtattctcttttatcaaggtgttttttatcgtctgaatcgaaaacaacaaaaacttttggttggcttacgctctcttccaatcggaagcgatttgaataagcacatcagctttaatctcgatgaacaagtcatcttggctgctagtctttttgattttaggactatgggaccggttaaggcaccaaaagcttttaatatcaaggattttacaccgagatttcgctttgatctgaaaggtgacagtgaggttattcttacattagcctttgattttgatggtttcttggtacatgatcgccaagagttgagtcatttaggatttactagtaactatcgtcatgagcaggctgtttttcgtttgatgtctaaacatggattcacccctgattttcagtcatctaaacgattaggtagcagtcaagagctctatgatttctttacaaatactctaccagattttgaaaatgcaggaacggttctgattggacaggagttgcgtgacttacgggttgaacagagtccacaggttcaggtagagcgtcagggaaatttattagatatttcctttgatttttcgagtcttgacgacgaagatgtggatcatgctttagcagccttaatggaaagctcgccctattttatcaatcgtagtggtcagttgattgtttttgacgaagcgacgcatcgtattagtgagagtctcaaaactctgagagctcgttactcaggaaaaggtcacctagagctcaatcaattaactgcctatcaattgatggatgctctttcagaaagtgattctgttcgtttttcaaaagatttccaactcttaacgcaacatttgagtaagccagagacctttgatttgccaacctataaggtagaagctggccttcgtccctaccaggaaagaggtgttcagtggctatcgatgttgcatcactatggttttggcggtatcttggccgatgatatggggttggggaaaactttgcaaactattgcctatctctctgcacatttagaagaaggacaacgagttttggttttgtcaccatcaagcctgatttacaattggcaggatgagtttaaaaagtttgcccctcagttagatgtagcggtttcttatggactcaagccaaaacgtgatgacatcattgctgaagaccaccagattattattacaagctacgcttccttccgtcaggattttgatgcttacaaggctggccaatatgactatctcattctcgatgaggctcaggtcatgaagaatacacagacaaagattgcccaatatctacgtgatttttctgttccacattgcttagcactatctggaacgcctattgaaaatcatttgttggagatttggtctattttccagattattctaccaggacttttaccagctaaaaaaactttccttaagttaacacctaaggaagtggctaggtatatttctccctttattctaagacgtaaaaaagaagaggtccttcctgatctaccagatttgattgaaatcactcaccaaagtgaattgtcagatgctcaaaaggctatctatttagcacaattgcaacagatgcaacaaggattaatttcggcaagtgatcaggaaatcaaccgtcgtaaggtggaaatcttgtcaggaattacccgcttacgacaaatctgtgataccccagctctctttatggactatgcgggagatagcggaaaattagatagccttagagagttgcttagccaaattaaggaatcagaccatcgtgtccttatcttttcacaatttcgtgggatgttagatattacagagagtctcttacaagaattaggaatttcctcatataagctaacagggtcaacgccatctgatagtcgtcaggagatgaccagagccttcaatcaaggaagtcgagatgcctttttgatttctctgaaagcaggaggagtgggactgaatctaactggtgctgatacggttattctgattgacctttggtggaatccagcggtagaaatgcaggctattagtcgtgctcaccgtattggtcaggaacaaaatgtcgaagtttaccgtttgattacaagagggactatcgaagagaaaattcttgagcttcaagaaggcaagaaaaacctggtaacaaccgtcttggatggcaatgaaagccgtgccagcatgaccgttgaggatattaaagaaattcttggtattgcaatatcttaatttgttatatttgatattgaaatactaagaggtaaaaatgctactaggcaaatcttttgaattaggctataatagaatattgcaagacgtatcttcccattcccgattgtttatattaagatacgcatcatctcgaaaatgaaaggaagtcttttatgcatcgccaaagacgacaatttccgctgatcccagacggggaaccttgcttgcaagaaccggtctctatgcgcctatacgaaaatgaagatttaatcacaaatatccgtggcccttaccaagataaggactacaatgatttgttgccgaactatgatttcttgtcagctaagcctagcaatcgtaagcaggctccaaaacgagtggagacacaagaggctggcatgacttatgctgaggaagcccgtgaaaaggctaagcgtgatgtacgtgagaaacgacaaaaattcctccgccaagaagttcaacaaaccaaacatactaatagccgccaactgactgctaagcctaaggtagaagctaaaccaagctttgaggccactgttgagccagctgctgtaacaacggataaaggaccagtgacagcctctatcttgggagctcctgtaagtgctatcaagcgaactttagcgcctaatgggaagcactcaaagatccatcacttggcaaatcgtctgcaacaagattcttacatcttggcagaagtggctccaacctatcaacagcctagtaacccatctcgtaagaacgtcaagaaaaatagctatgacttcttgaaacgtagccaggtttataattacccagaacgtcaaacttaccgtgaacaccgagttgctcaagaattaaatttgacgcatttagaagacgcaaactaatcgcagtgcgattgtaaggagaaactatgtcaaaaacttatcattttattggaattaaaggatctggtatgtcagctttggctttgatgctccaccaaatgggacacaaggttcaaggttcagatgtggaaaaatattacttcactcaacgtggtcttgagcaagcaggtattcctatccttcctttcgatgaaaaaaacatcacagaagatgttgaattgattgctggaaatgcctttcgtgaagataacaacgttgaagttgcttatgcaattaaaaatggctacagctttaagcgttaccacgagttcttgggtcacttcatggatcaattcactagctttggtgtggcaggtgcacatggtaagacttctacaacaggtctcttgtcacatgttatgaaaaatatcaccgacacgtcataccttatcggtgacggaactggacgaggttctgctaatgcacaatactttgtctttgagtctgatgaatatgaacgtcatttcatgccataccacccagcatactcaatcatcactaacattgactttgaccatcctgattactttacaagtatcgatgatgtgttctctgcctttgatgactatgctaagcaagtgcaaaaaggactctttgtttacggtgaggatccacaccttcgtaagattacagccaatgcgccaatctattactacggttttgaagaaaatgatgactttatggcaacagatattgtgcgtacaacgacagggtctaattttaaggtgaaacatgatggacaaatccttggagaattccatgtgccagcctatggtcgtcacaatattttgaatgcaactgcggttattgggaacctctatgtagccggttttgacatggacttggttgcggaacaccttaaaactttctcaggtgttaaacgccgtttcacagagaaaattatcagtggtactgttgtcatcgatgactttgcccaccatccaactgaaattattgcaacgcttgatgcagcacgtcaaaagtacccatctaaagagattgttgctattttccaaccacataccttcacacgtaccatcgcccttcttgatgaatttgctgaagctttgaacgaagcagatgctgtttatttggcacaaatttacggttcagcgcgtgaggttgaccatggtgatgttaaggttgaagatcttgccgctaagatcaataaacctgccaaagtggttacagttgaaaatgtctcacctctccttgaccatgacaatgctgtttatgtctttatgggagctggagacatccaactttacgaacgctcgtttgaagagctcctagcaagcttgcaaacacatatgtaatagattaagggctgtagcgatttcgctcagctctttctcttaatagaaaggaatttgatatgcttattcgacatgcccgagaggatgattgggatgatgttgttcgtatcgaacaagaaaatttttcgcctgaagaggctgcaactccagaggccattgcggagcgtttagagacgatttgtgatacctttctaattgctgaaattgatggcgttgtagctggctacatcgaaggacctgtgattgcggaacgttacctcacagatgacctgttccataaggtggctcctaatgctagtcaaggaggttttattgcagttactagtttgtctatctccaaagattttaaagggcaaggtattggaacagccttgattgcagcgcttaaagatctggctattgctcaaaaacgccaaggtattagcttgacttgtcatgattacttgattgcctactatgagatgaatggttttactgatgagggagaatcagaatcaaatcatggtggaagctcttggtataatatggtctgggagaacccagaaacccattgatttcagtgttacgttactgtgacaaaggaccaattgatttgcattaactgactttttaagatataatggcgtttgttactatagaggaggtatgccttgacggacaagtttaatgaacactcggaagcttctgaagatagcctaagcttcaaaaatcagattctccgagacttacaagaagcgacacggctccgttctcttcgtgaggaggagcataataaaagtgcaactatgcccgagacaccactttcaacgtcagctgagagcgctacaactcgtagtgattcagcgtctaataaagtaagtaaccaagattttagttcacattctgtttcacacagtgcctttgctaaatctatgacttctgagacagcccaagattctcaacaagatagtcttggcttgttttcagattcccaagcggagtctttagtatctgatgctcattcaaacctagcgtctattcctaaagagccaattgaggaggagacaaaggtaaatattcctcaggagactgaaacgtcgaaacgccgttttaaacgtccagtttgggagactagtcttaacgaagcatctgaagaggagtatattcctgcagatgtggctaaggagctcattgaagctaagtctaacgaagctatttatacagaccctaaagaattggaggccaaattgacctcagaacgtcaaaaagaagcattcttgcaggaacatcatgaaacaagtgaccaagcgtcgcaagaaaaggttcaatcagagctagtagctgatggtaatgaggatgatgagagtattgctctagaaccctctggaaagcctaagaaaaagaaaggcaagaaagtgaagaagaaaaagtcttcaccaaaagatggtaaacaggctgacattgtcgacgaagagccgatttcacgttctaaccgaaatcacaaacgcaataaaaataaccgccgtgctgggaaaattgcaagaaatattattatcttcttgcttcttatcttgtcagtagcgacattctttggttatcgttatgttagtgatgctgttggcgcaaaagatgttaattcaactaagtttgttagtgttgaaattcccgaaaattcaggtagcagttatattggccaactcttggaatcagctggtgttattaagtctggtaaggtctttaattactataccaagtttaagaacatctcaaatctgaaaagtggttattacaaccttcaggctagcatgaccatggatgaaattattgaggcacttcagaaaaaaggaagtgataaacctcaggagccatctcttggtacggtcttagtcaaagaaggatataccattgatcaaatttccaaggcagttgaagttaattcttcagctaaaaaaggcaaaaaatcatcaactggacttaaggcgaaagatttcttgaaattgatgaaggatgatgctttcattactaagatgaaagcgaagtatccaaccttgttggcaaaccttccgaattctacggatgctaagtatgtcctagagggttatctgttcccagcgacttataacattcatgatgatacgacggtggagtctttggcagaggaaatgttgtcaacgatggacacctacctatcaccttactatgcgacgatttcatctagtggacacaatgttaatgagattttgaccctagcttctcttgttgaaaaagaaggagctacagatgacgaccgtaaaaatattgctagcgtcttctataatcgtctaaactcagacatggctctacaaagtaatatcgcagttctttatgctcttggaaaacttggtcaggaaacgaccttgaaagaagatgcaactattgacacaaacattgactccccttataatgattatgttcataaggggttgatgccaggtcctgtggatagtcctagtctgtctgcgattgaagcggttatcaatccatcatctaccaagtacatgtactttgtggcagatgtaaccactggtaatgtctattttgctgaaagctatgaagagcatcagcataacgttgaaacttacattaacagcaaactaaaagataaatagtctgattggctcattaaaaccaagcaaacgaatagtgattttgatgatgcagccaacggctcaaaaaatagaaaagagaaaaaaatggcagaaaaaacatatgtaatgacacaagcagagaaagaacaacttgaagcggaattggaggagtacaaactcgtccgtcgtccagaagttgtagaacgtattaagattgcacgttcttatggtgacctttcagaaaactctgagtatgaagcagccaaagacgagcaagcctttgttgaaggacaaattcagattcttgaaacaaaaattcgttatgcagaaatcgttgatagtgatgctgttgctaatgacgaggttgcaattggtaaaactgttgttgttcaagaagttggtacaaacgacaaagatacttatcatatcgttggggcagccggtgctgacatcttctcaggtaagatttcaaatgaaagcccaattgctcaagctttgattggtaagaaagttggcgacaaagtcgctatcgaatcaccagcaggtagctactctgtagaaatccttagtgtagaaaaaacagcctaagtgactgttggcgttaaagtgtctaatatttgaaactagtgggagtgagacaaagcagttgttctgtctcactccctttttggttgccggcgctagtaggagttaggctagtctgaattaatctataagaaaagcactcttggcaaatgatatgatacctcttaagtagacaaggtaaatacctaaaatctacttaagaggtatttttatgtctagaagagaaaggttcaccccatacgagaaagaacaagcttgtctcgattatattaatggtaatcgttccagatctgagatatgtaactgtctccatatttccacaaggacgattcaagattgggctgccatctataaaaaatatgggattttaggattcacaaagaaaacaaaaaaccgttcctattcaaaagaatttaaaatggaacttgtagaaaaatgtattagtggtgaggcttcatctattgatttaggtcatcagtatgatatttcttcaggacttttaagaaagtggattaggatgtataatgccaatatagaacttaaggattacaatccaaaacgggaggtctatatggcaaaagcaagacgtaaaaccactattgatgaacgcaaagagattgtcaactattgtattgaacataatcgcaattataaggaaacggcatcactttatgatgtttcttatagccaagtgtattcgtgggtgaaaaagtatgatagtgatggtgaagaaggtttagttgacaaaaggggtcatcacaaactagatgatgaggttgatgaattagaacgtttacgaagagaaaatgtgcgcttaaaacgtcagttagaagaaaaggatatgactgttgaactcttaaaaaaagtgaaagaattcggaaggatgtgaggctaggcaaacagcgccacgaatcaaaatacttagcgatcgaagacttcaacaccaacaaagggtggagcattagctggatgtgtcatcagctcggcattacgaggtctgcattttataaatggaaacatagaatagttccagaacaagaacaattaaacagcgaaattgcggaattaattaaagaatatgacgaacgtttttcacacatcttgggataccgaagaatgaccgattggatcaatcatttcaatcatacgaattactcaagaaagagaattcaccgaattatgaaagtactcgatatccacgcttttatccgtaagaaaaggaaaaaatacaagactgccaagcctaaagaaactgcagaaaataagttggcaagaaacttctatacaactgctccgaacaaaaaatgggtaacagatgttacagagtttaagattcctaactctcataagaaactctatcttagtgtcatacttgatttatatgaccgctatcctattgcttttgtcataagtggtcgaaatgacaatcggctggtcttcaaaacatttgacaaagccattgaaaaaaatcccgcagcgaagcctatatttcacagcgatagagggtttcaatataccaataagaactttcaaaaaaagctgaaagatactgatatgattcaatccatgtcaagagtgggccattgtattgataacggaccaatagaaggtttttggggaattataaaatcggaaatgtatcagatgtatgagatttcagatgaggcctccctccgatatgccatcaaagactatatccgattttactgtcaagagcgtccacaaagtaggtatgactgtaaaacgcctttggcagtaagaaacgctgccttatcatcagaacatcctttgtcatacccaatcgctaagaataacaaaattgaaaagtacaagtctaagtggtctgcataaaaaaacagccgtacatttattatgtacgactgaccttcaaaaacagacacttttttagatatttaacctgtctacttgacagggggcatatcaaaatgccaagagtgctttgtagcttatttacgattttgcttaccggcgttacgatttttctttggtttacttgcaattgcttgagtattttttggtgtcacatctttacgcttgattggtgttgtacgaggtgcttttggagggttctttttgaactcttcagcaactttttctttcaagcgaggtttgatgatgtagttggtaatcaactgttggataatagagaagataccaccaacgaaccagtagaggattacggctgcaggtgagctaataccaaagaaaatcatcatgattggcatactgtacatcgtcgctgccatttgtttacgttgctcctcaggaacttgttgaatagacaaccaagattggaagtagtaaagagctgcgatgatgataatcaatgggaagtcacggtgaccaaggttaaaccagaggaagttatcttggagtacaccaggagtgtaacgtgctgcgtagtagagtgctgagaagaacgggaactgaatcaatagaggaagacagccgacaccacccatcaagcttagaccgttttcacgctgagcttgcatgagttcagactgggcagccattttttcttcttgagttttggcgttacgcaaacgttcgttgattggttccaagataggcgcaaggtactcacgttttgctgattggtaggctgcgctacgagattggtgaagaccaagtggtaagataatcaaacgaacaatgatggtaacaaagataataccaagaccaaagccaagaccaagattatctgcgaagtaggtgatgacgtggctcatagggcgaccaaggaggttccagacccaaccagtaggattaccagacttatcaaggctcacacatcctgataggaagaaaagcatgctggcagcaagccccatcagggctagacgtttttgatttttattcacaatatcattccttttgttttttagttatacttgtctattttacctttttttaagaaagagaacaagctaaaaacggtggcttcctcttaattagccatccgaaaatcgctgtaatttgagaagtttgccatggtcacatcgacataggttactttagaccattttgaaggtccttttcgaacttcttgaataaatttagctaacttagcaggattatctgactgagctaggatttcaacagttccgtcgtcattattccaaacccgaccgtatatttctccaatatctagtgctagagcataggttgaataacgaaaaccaacaccttggactctacctgagactaataatcgtactttttgcatggtccatgacctccttttgaaagctctttcctttagtataatccttgctataaagtcggtcaagtccaagatttatcaaggaatttctgctataatgagtgtatggaaatcattcaatcaaagcaaaatgctagcattaagtctgctagaaaattattgcagcgcaagcaccgtaaaactagttatcttttagaaggatggcatctttttgaggaagcaaaggcaagtggtgccgatattcttcaagttttcgtgcttgaggaaatggctgatcgtgtggctaatatggctaaggttaagttggttagtccggaggtgctcaaggagctctgtgaaactcagaccccccaagggattgtggcagaagttgctaaacaatctcaagccttgccagaacctctctcagggaagtaccttctcttggaggatgttcaggatcctggcaatgtaggaacaatgattcgcacagcagatgccgcaggttatgatggagtctttttgtcagacagatcagctgatatttataatcagaagaccttgcgttctatgcagggaagtcatttccatcttccaatctatcgtggaccaattcttgacatggttgaggcttgcaaaaagcaaggcgtacccgtcttggcaacgactctctcagatatctccgttgactataaagcagttaagacagatggcaattttgccttagtgatgggaaatgaaggtcaaggaattagtcaggaaatggctgagtctgctgatcaactcgtacatattagcatgtcaggtcaggcggagagtctgaatgttgctgttgcagcaggaattctcatgtttagtctctaggtctcaaggatgattttaggagaaaacaactgacttttaaagtaattttaaggactagtggtataattaagaagcattagaaacattaatgaggtattattatgaaacgaccagaagatgataaagaattcatggaagttgtgggacatttgatttcacacccacgttttcaaaaattggatgggattgtacagcaccatcattcgacacgtttagaacactcggttaatgttagttacaccagctataagattgctaaaaaatttggctgggatgccaagagtactgctcgaggcggtctcttacatgactttttctattatgattggcgagtgactaaatttaacaagagtcatgcttgggtacacccacgtattgctgttcgtaatgccagaaagcttgttaatttaaacaaaaaagaagaggatattatcctcaagcatatgtggggagcaacgattgcaccaccgaagtataaggaatcttatattgttactatggtggataagtattgggcggttaaagaagcggcgacacccttacgaaaccgaatcaaaaatcgtaagtttttccgtcgtaagaccctacaaagccaccaccaataattcattatttttaggagataactatggaatcaaatgcaatttatacgactagtgatgcgggcttaagccgctttttcggaaagatttatggccttgttggtatgggagtgggactttcagcagtcatttcttatctgatgctcttccctctctctcatgtttttgtcaatattctcatgaattattcttgggtttacatggcagccctctttttagagtttggtttggtctttttggctagcggtgctgcacgaagaaatacacctgcagccctacctttatttttggtttattccgctttgaatggatttacacttagttttatcatcgttcaatacacgcaagctatagtttttcaagctttccttagcactgccattgttttctttatcatggcccttatcggagttagcattaagcgagatctatcaggcatggctaagttccttatggcagccttgattgggattattgtggctagcttgattaatattttctttgcaagtagcatgatgagttttgtgattagtattgtatcaattctcattttctctggtttaattgcctacgataaccagttgattaaaaaggtttactacggtgccaatggtcaagtcacagatggatgggcagtttctatggcacttagtctttacttggatttcattaacttattcttgaatatcttgcgactctttgctagacgtaattagtaaaaaaatcagccatctggctgatttttttaatgtctaatagttttttgtaattgtcccttgctgacctgtgtaagcgtagaagagaggatagtactcccattttccgacatagctatctttatctgggaaggcccacttgtcgtcttttttagtaagctcgactgagtaattatcaaagatattagttccttctgtctttggtgctgatgggcttacttctttgattgaatttggtaggtaagtttccatgtagtattgtcttgttagttggtcgacatttccagcgttggcaccattgctttgtaggtagtttttaaggtcatctgtgagatttgggtgattagcaccgtaggcatcgtctgcagctttcatactgatagttgacatgctgacgttaaactctgctttatctttagcgacgataatgttatcaacagtgtagctaccgcgttcacggttagcagtttggacccaaccaaaaacttttggaatttcatcaccagttggtttgatatgatcagtttcattatagctgtattgaaggctatctgagaaatattggttaagttcacccttggctttatccaagtcattagaaacaaatttactgtagtctttgctttcaccacctagaagaactgcattgaaataagcgtcaatagcctttttaacattggtagttgttttaccatcgaaatcttttaggctagtagaaactgtttgtccctctgttttttcatcttttgattcaaaatagagtttatagctttcattgttgttaacttcgaaaaagagtgagacagtcttgtagtcgtcagcttcaagctttccaaagtcatctgtagcgtcctctacgttcttatttttattgaagagagtaggtaggtcgcccttatcgagcttgcttgctgtgacttttttaccatctttatctttgaggtagaattgtttagcagatgttttgagctcattttccatatcttccgaagtattctcgagtttgaatgaaacttcgactagggtttggtcatccttgagcttgaggtcgcttcctgacatatagacaatatcgttaacagaaagcttggcatcaagttttggcttggcacatgctgagagtgttaagatggctgctagagcaagagccccagagtaaagatattttttcataaataatcccccattattttatttaggttataggtctattgtatcatgaaatatgccttgagattattagaaaattgggtttcaagccttttcttatgctataataggattactattgtaaaaaaatggagaatcaaatgacaaaaacaccttttattacggctgataaacttgaacaaatcactgcagagtttccaacacctttccatctttacgatgaaaaaggtattcgtgaaacagcgcgtgcagttaatgcagccttttcgtggaatccaggttttaaagaattctttgctgtaaaagctacacctaatccagcaatcctcaaaatcttgaaggaagaagggtgtggtgtcgattgtgcgaccgatacagagcttgtcatgagtaagaaaattggttttgatagtagcgccattagctttacgtctaatgatacacgtgcagaagagtttgtttacgcgcgtgatattaatgcgacaattaaccttgatgcttacgaagatatctttttcttggaagaggctgcaggacttcctgaaaccctttctttgcgctttaacccaggaggcgtcttctctcttggtactgatatcatggatcatcctgaagaatcaaaatttgggatgactaaggaacagctcttcaaaggttatgcctaccttaaagaaaaaggagtgaaatcattcggtttgcatgctttcttagcgtcaaatacagtaacgaatgagtattacccaaccttggctgctcaactgtttgaattggcggtagaaatcaagaatgaacttggtgttagtcttgactttatcaacttatcaggtggtgttggagtggactacacaccagccaataaacaaaatgatattgccgttatcggtgaaggggttcatactaaatttgatgaaatccttgttccgaatggtcttggacacatcagtatttacactgaacttgggcgtttcatgacagcacctcatggccttgtcgttactaaggttcttcatattaaagacacttatcgtcgctatgttggtgtagatgcttctgcggtcaacttgctccgtccagctatgtacgatgcctaccaccatatcacgaatatgactaatccagatggtgacattcaagtagttgatgtgacaggttcgctttgtgaaaataatgataagtttgctaagaaccgtgaattgccagaagctcgtattggagataccttggttatccacgatacaggtgctcatggtttttcaatgggttacaactataacggacgtcttcgttctgcagaaattctctaccaagaagatggcacagctcgtatgattcgccgtgcagagacgatggatgattactttgccactcttgatggttttgattttgatatttaacaaaaaaataagctaggccttaaaggctctagcttattttactttaatgatgacagcttcaagaatgatatcggctaactcctcaggagattcgatacagccttctttgagccatagtgttaaaatggtaacaatggtgctaacataaacttccaatgaatatttggcagggatatgatagctttgttccatgagctctgtaacattttcaatatcagagttaaggatagtctcgataatgaattcacgaatcatctcattgatgtttggaatgtgtgtcatcaaggtgagacagagtttttgattttccttaagatatcgtagcatttcagtgacaacaccctcttggtaggtcatgtcttcctgaagaatacttgagattttatctaaaatctttgagaaggttgtttcaaccaaatcttccttatttgaatagtagtagtagaaggtcggtctgctgagatttgccttcttgatgatatctgtgatgctgatttgttcgagtgaactctcctctaagagttcaataaatgcgttgacaatttttcgttcggaaatagttgcttccttgagcataaataaacccctttatataaacataataataattccacaacctatataataacctatttttgttctagaaatcttacaagtcctttacagttgtaagtgaaaaatactgaaagtctcattttatcggtattttaaacgaaaaaactatttttctagacgtttttaagaatcaacgtcttatttgtcagtaggggccatttttgctataatataaggtaaatcaacgttataggagaaatgaatttatgaacaccgtcctttggattattcttgtttttgtagcccttttgggtggtttttatggaggcgcatactttgcccgcaaacaaatggagaaagaattggctgaaaatcctcgtttgaatgtggacgctgttcgtaccatgatgtcagctgcgggtcaaaaaccaaatgaagcaaaagtgcgtcaaacatataaccaaattatcaaacaacaaaaacaagcacttgcagatagcaagaaaaagaaaaaataatggtggggagctgggacgtgaatctcagctttttacatgtaacctaggggataaggaggcaagatggataatcgacctataggatttttagattctggtgtcggaggactgacggtagtacgtgaacttaaacgtcagttgcctcacgagtctattgtttatattggtgactctgctagggcaccgtatggtcctagaccggcagaacaaatcagagagtatacctggcagttggttaaattccttctgaccaaagatgtaaagatgattgttattgcctgtaatacggcaacagcagtagtttgggaggaaatcaaaggagccttggatatcccagtgctaggtgtggttttgcctggttctagtgcggctattaagtctagccaatcgggtcatattggtgtcattgggactccaatgacgattgcctctaacatctatgaacaaaaaattaagcatttggcaccacaaatgaatgtcttgagtttatcttgtcctcgttttgcccctattgttgaatccaatgaaattaactcaagtgtggctaaaaagattgtttatgagagcatggcacctttagtcggtaaggtagataccttggttttgggttgcacccattacccacttttacgtcccatcatccaaaatgttatggggccaagtgtcaagctaattgatagcggagcggaaacagttcgtgatgtttctgttttgctcaattattttgagattaatcgcagccgtgaagtcgaagacaagacggaagaatattacaccacagctagtgtgctaggttttaaagaaatcgcagaacaatggctgggtgaagaagttgctgtccaacatgtcgatttggacaaggagttagaaaatgactaaatcaatttttgaatataaagacgaacaagactggtatttggctagttttggaagctacaatcacttgacttgttttggtggtgatgaggcctatgagcaatttgttgactttttccaagctttgactaacgttttggctgttagtggctttcagttacatattgcgaaacattcttcagaccttcgcttggtatcctttattttggattgcttgaaagaggaaactggtcgtgacttagctgttacgcaacatcaaggggctttggtagttagtgaagcagataagcttgtctatgtgcatgtgcctagagaaggtgtttccttgagtgatttctttggttctgataacaaatcagactttggtgatgtcctattgattgcgacacgcaatgaaggaaaaaccaaggaatttcgtaaactatttggaaaactaggcattaaggtagagaatcttaatgattatccagaccttcctgaagttgctgaaacgggtatgacctttgaagaaaatgcacgcttgaaggcggagaccatttctgaattaactggtaaaatggtcctttcagatgactctggtttgcaggtagatgttcttggaggtttaccaggagtttggtctgcacgctttgcaggtcctgatgctacggatgctgaaaataatgctaaattattgcacgagctggctatggtgcttgatgatagcaaacgtactgcgaacttccatacaaccctagttgttgcggcccctggacgtgatagtttggttgttgatgccgactggaagggttatattggccgggaacctaaaggtgacaatggttttggttatgatccactctttttagttggtaatacaggtaaaacggcagcagagctttctgcagaagagaaaaatgaacaatctcaccgtggacaagctgttaagaaacttatggaggtcttcccagcatggcagaacaaacaataatcgtaatgagcgactcccatggagaacgtgacattgtagtagatataaaaaatcgttatcaggggaaggtagatgctattttccacaacggagattctgagttagaatcaagtgatcctgtctgggacggtatccatgtggttcgtggtaactgtgattatgattcaggttatccagaacgtttggtcgttaaacttggtgatgtgattattgcacaaacacatggtcatctttatggcattaattttacctgggacaagttagatctttgggcgcaacaagaggatgcagatatttgtctctatggacacttgcatgcggcagcagcttggcgaaatggtaagacagtgtttatcaacccaggttctgtttcgcagccacgtgggcctatccatgagaaactttatgctaaggtgattataaacagtgcaaaaattcgtgtggaatattacacacgtgaccatgaactttattcagaacttacacaggaatttgaacgatgattgctaaagaatttgaagattttttgttggctcatttagataattatttaattccatcagatcaggttgctatttttattgatagtcacaacgctgatcatgtggtcttgcttttgacaagcaatggttattcgcgcgttcccgttttgactaaggataagcactatcttgggaccatatctttaacggatattaagcgttatcaagatgaacataacttgcaagagtgggagatggttaaccgtgatatcgggccgatgacatcagatgttgtggaaacagtggaagataatgccaatctaaatgaggtaatgcataagctagttaataatcctttccttcctgtggttgacagccaaggtattttcaaaggaattatcacacgaaaatcgattctaaaggcggttaatagcctcttacatgactttacacatgactatatcatcattccaaaaacaactgacaactcagatcactgattttctggctactaaggtcatttcggagagttcaaagcaagcttatgcttatgatcttaagcagtttgcaacgtcgatttcaggacaaattgatcaaaccagtctcaagctctatgaaaaccaactgaaggaatggaagccatccgtacaaaagcgtaagcgctctgcggtcaatcaatttttgctatacctctatcaaaagggtgaattagagaaatttttcaaactatcagagacggttacaataccttctcaggaggataagttgcgaacactggatctttcatcgctttatgaggggcgtgaaggggttggtaagctggcttgtctgctgattctagagttgggactcttaccttcagagattttggagttggactgggccgatattgacttggattttggtgttgtaactgtggccaagggaagcactaagcgtgttctcagacttgaagcagatgtgaaacagtatttgttggctattaaagatgtgaacagtcagggcttgcttttgggtaaggtctatactcgacaatggctgtataagcaaatccagacttatgttagtgactgtggcttatcgaatgtaactgctcaagtcttgcgtcagcaatttattcttagacagattgaaaagggaacgggcgcctttgaacttgctcgtttactgggactaaaaagtccagtgaccttggagaaatactataaaacctaatggatattaagttaaaagattttgaggggccactggatttgttgctccatctggtttctaagtatgaggtagacatttacgatgttcccattgttgaggttatcgagcaatacttggcttatttggcaaccttgcaagccatgaagcttgaagttgctggggaatatatgcttatggctagtcagctcatgctgattaagagtcgtaagcttctgcccacagtggtggaagctgagcctgaagcagatgatccagaactagagctcttgagtcaattggaagaatatgcacgcttcaaagcagctagtcaagagttggctaagcagcatgaggtacgagctcagtatttttcaaaaccaaaagttgaattggtttatgaagatgtgacgctgaatcaggataagaccattcaagacattttcttggctttttcaaaaatcatggctgaaaagcaggaagaaattcgtcgcaatcacacgaccattgcgcgtgacgattataagattgaagacatgatgttgattattgaggaagcattcggctcaaaaaatgagctacatttagatgaacttttcacagatgctaaagatatgaatcaagtaattaccctctttttggcaactcttgaattgattaaggtacatcgcatatcagtacagcaggaaacaatttttggtacaatcacattaagaaaggaatggacgaatgagtagtcacttagcacgattagaagctttactttttgtggctggtgaagatggtcttagtctacgtgctatggcacagcttttggaaatgccagtgacgggtctgactcagtccttggagaaattacaagccaagtacgaggcagacgaggattcagctctttgtttattggaatcgtcaaatacctataagctggtgactaagccagattttgcaagtctccttcgtgactattctaaaacgcctattaaccagagtctatcacgagcgagtcttgaggtcctctctatagttgcttataaacagcctattacacgtgctgaagtcgatgacatcagaggtgttaattctagtggtgctattgctaaacttcaggcctttgatctcattcaagaggctggtaaaaaagatgctgtcggtcgtcctaacttatatgcgactactgattatttcctagactatatgggaattaacagtttagacgaacttgtggcgattgaccaactagaacttgaagagcaggaaacaagtctctttagggaagatgcttcagaagagcttgaggactcggacaattaagagtaaaccttgttgaaactaatcattaaaaataaagaaacatagcagagatgctaggtagaaaggatacagcttaagctgtagaaaaagaatgcgaattaataaatatattgcccacgctggtgtggccagccgtcgtaaggctgaggaactgattaaagaaggtcgtgtgaccctaaatgggaagaccgttacggaattggcaaccattgtcaaaaatggtgacattgttgaggtaaatggtagtccaatttataatgaagagaaggtctattatcttcttaataaaccacgaggggttatttcttcggtgtctgatgagaaaaatcgtaagacggtgattgaccttatgccccacgttaaggaacgtatctatcctgttggtcgtcttgactgggatacgactggtcttcttattttgactaatgatggtgactttaccgataaaatgattcacccacgtaatgagattgacaaggtttatttggcgcgtgtcaaaggtattgcgaccaaggagaacctccgtccattaactcgtggtgtggtcattgatggcaagaaaaccaagccagcacgttacaatattatcaaagttgaccatgaaaagaatcgttcagttgtcgaattgacaattcatgaagggcgtaaccaccaggttaagaaaatgtttgaatcagtgggcttgctcgttgataagttgtctcgtacacgttttgggactcttgatttgacagggcttcgtccaggtgaatcacgccgtctaaataagaaagaaatcagccagcttcataacgctgctgtcaacaaggtcaaataatgaaaagatttctgattgccttggtcagggcttatcagagatggatttctcccctatttccaccgtcttgtcgttttcgtccaacttgttcggtttatatgattcaagcaatagaaaagcacggcttaaagggagttcttatggggattgcccgtatcttaagatgtcaccctttatcagagactggagatgatccagtgccagattattttagtctaaaacgtaataaaactcctttggataaatgaatccaaaggagtttttctatacttaagtttttgaccaagtttttggcaggaagaggagtaataaaggatagatttccaagcgtcctgcaatcatagcaaatcccatgataagcttagataaaggactgaaaatagcaaagctatcagtcgttccaagtaatggtccaatgttgttaaaggttgaagcagcagcacttgtcacaatcaagaggtcttgattatccagtgacaaaacagtgactaaacttagtataatgagtacatatacagctaggtatttgagaacactgtgctgcgtttctttatcgagaacacttccattaatatgaagtgacaggatacgattaggatagaggctagccagggtctgatttcgtgcaatcttagcaataatcatagcacggataaccttgaaaccaccagctgtagaacctgctgaccctccgataaacatcaggaggagtaggatatactgagaaaagagtggccatttggtaatatctgtcagaccaaaaccggttgttgtgatgatagttgacacttcgaaaaatgagtatttgaaagagtcagccaaattgtggtagattccaaaaatattgaggataattaaaccagttgaaatagccacaatcgcaaagtaggtacgtagttcttcatcttggaagaaaaacttgattttgcgaaggaggatatagaaataaaggttgaagttaaccccaaagagtagggtaccaacagtaaccacataggtaatcagatcgctgtggtagtgggcgatagagtcattatagacagcaaatcccccagtacctgcgccccccatagcagtgatgatactatcaaagattggcataccgcaaagccagagaataacagcaaaaataacgaacatggttaaatagatgatgtaaagaatttgagctgtatttttgagcttggccacgaccttaccaaaaactggaccaggcacctctgcacgcataacctcatggtgaccatttttactgttgttcatgatggctagggcaaagaccaatacccccatccctccaatcaagtgggcgaagcttcgccagaagaggagggagtgggtgagtactccagtatctgtgagaatagtggcccccgtggttgtaaaaccagagctcatctcgaagaaggcatcaatgacacttggaatctgtccagcaaagacgaagggcaatcctccaaagaaggaccagagcacccaacagagggctacaataagcatcccttctttggtgtaaatgtggtagttcttcggtttaaagagagtaccaagtactccgagaaagaggagaatccccatcgtacccaagatgctggcaaatactttggcatcttcttgataaatgagggcaacgataagtggtacaaccaatagtgccgcctcaataagcaggagcttggcaataagaaaacggacaatagatcgattcatggcagcttacctcttcaacaagtcgtaaatatgagttacattttgtaagagtgtaacgatcacgattttatccccaatagcgagtctgtcttctcccgttgggaaaatagattttccattgcggataatagcagcgataaggacaccattagcaaattcaagctcagaaagtttcttcccagcgattttgttgttttccttaatttggaattgcaaggtttcgatacgaccattagccacatggtgaagggcatcgaggctagaatctttagcattataacgcccacggacaaagtgcattacagtgtcaacggcaatactcttaggtgtgacaattgttgttgtctcacgtgtatcgataatctctaaaagactggtacgattgactttagtaatattcttgtgaataccaaggctttcgaggaacatagaggtgatgatattttcctcatctactccagttagggtagctacggcatcataactggctgcactttcctcgagaagaaggtctttagcagtaccgtcacctaagataacagaaacttcagggaagacctgactaaaggtttgtgcacggtccattttttgctcaatcaatttgaccttaatacgattgtttttcaagatattgagcaagtagtaggagatacgtccagcaccaatcaacaaaagttttttgatactttttggcttgatgtaactgtggaaaagtgccatatcaacacgtttaccagtgacataaattttatccccaatttgcatggtagcattcccatctggaatgatgagttcaccttgacggtcaatcgtacaaactaggatattgccgaatttcttacggaattgctccattgtcataccagacaattggctattttcagtgactttaaatgccataagaataacgcgtccgttagcaaaagtttctactgatagagcatttggaaattcaaccgtattggcaatatagcgagcggttaaaagttcagggtttacgactaatgagaagccaaggaagtttttatccttgaaataagcatttgagtattctgggttacgcacacgaacaatggtttctttggcacccatttgtttagccagaacggctgaaatcatgtttacttcatctttatcagtcatcgcgataaagacatcgcagttactaacctcggcttgttccagaattttaaaattagccccatttccagcaaagcccataacatcataacgtttgctgaggcgtttgaggacctcttccttttcttcaattaaaataacatcgtgcttctcttcaacaagagaacggcagagtgcggtaccgactttaccggcacctacgacaataatacgcatgagttacctccaaataatcattactatgatactctattttagcggaaaaatcatccttttcagctagctttatcaactattcctatttaagggaataaaggtaaaatttttctttaaatagtcttgacttttagactaaaagtgctaaaatatattcaaagattcgttattttaaatctaacctgtcatgatttaagctaatgaacgtccacaaccatgtcgtctgctgagcttgactccgggcgacatggtattttttatgtctaggagaattgagatgtcacgtaatcatattgtcttgtttgaacctcgtattccacaaaacaccggaaatattgcacgtacctgtgcagcgactaatagccctcttcatatcatccgtcctatgggctttccaattgatgacaagaaaatgaaacgtgcaggtctggactactgggataagcttgacatcacttattatgacaatttggcagatttcatgtccaaaaatcaagatggtcgtttgcatctagtcacaaagtttgcggataagacctattcagacgagaattatgctgatggcggggaccactattttatgtttggtcgtgaagatacgggtctgcctgaagattttatgcgtgagcatcctgaaaaagctattcgtattccgatgaatgatgaacatgtgcgtagtctaaatgtgtccaacactgtttgtatgattgtttacgaagcacttcgtcagcaacagtttgagggcttggagctgagtcatcgttatcagcatgacaagttaaaatagaggtctattttctcttataagagtatctatagtcattgactatcaacagattagaaatccataatttgagaaccttgtcaccaaggtttttttatgttattcttaaaaggtcttcagggcagggtgaaactcccgaccggcggtgattctatagataagtccgcgagcgcaagctgatgaggtgtgattcctcaaccgacagtatagtctggatggaagaagaccagtctttttgcgtaggcttttttggcataggcaaatccattgggaacttctttcaaattgttaaaatttggaggaatttttttatgacaaacacacgtaaattggcttacattgccattttatccgcagtttcattcttgttgctttatttttcatttccattgattccagcagcagactttttgaaggttgatttttcaatccttcctgttcttattgccttggttatctttgattttaagagtgccattggtgttctcttgcttcgttcattgttgaagcttttgctaaacaatggtggtccaggatcaatgattggacttcctatgaatttcgttgctctaggagtctttgtttggggcctaagctatttttggaagaaaaatcaaacaagcaagaattatattcttggttctgttgtaggaactgtcttgcttacagttgttatggttattcttaactatatttatgcagtaccactctatgctaaatttgccaacttcgatattgcgcaattcataggtctctataaataccttttcgctatggtagtacctttcaatgtacttcaaggattgatttttgcggtagcctttgctcttatttatgctccgcttaagtctattctagtaaaattataaatatgaaacacaaacacacacattatatttatgcttcttttgccttattgttatttgttgctctcggttacatggttaagttctatcctgaagccttaacaggatttgatagcaacattcaaacttgggttcgaggagacttaccagtaggattgacacgcttttttaaaacgattaccatacttgggaatacgcccgtacaggctattattgcaatcgtagcagtaatctggctttatctacgtcagtataaagcagaagctatctttgtaggagccagtgggcttctcgctagtatcttgattgtaagtttaaagtatatttatcagcgtcaacgcccatcaattacgcatttagtgcatgctagtggttattctttccctagtggtcactctttgggaacttttatgattcttggagcaattgccattgttcttgctcagcgtttggcgaaaaaagaatctaaaatagtagtttatggtattactgggcttctgattttccttgttggactttcgcgtatttatgtgggtgttcattatccaacagatgttttagctggctttaccttagcctttgctttgcttaatgctatctatccaacttatgaccgcattcgctttgaatggcgattccaaagtaaacagaaataaaacaaacatgtagtttttgaactgcatgtttttttgatgcaaaggaaggcccttcttatataaaatgtataaaaatagctttttttgactaatattctgttaaaatcatattaactgtatattaattatattacagttgtgatataatatttttaaatttttgaaataaaggagagtctcttgaacataaaagacagcattggactaagaatcaaaactgagcgtgaacgtcagcagatgtcacgtgaagtgctatgtttagatggtgcggaattgactgtgcgtcagttaattcgcattgaaaaaggggagtcgctcccgtctttggataaattatcttatattgcaaaacgtctaggaaaaaatatggccgatttattggatcatgacaatattaccattcctgacgaatattatgagatgaagaatcgtttgattaagtttccaacgtacagaaatccagaaagaataaaggctaaacttgccttaattgaggaagtctatgagaaattctttgaacttctgccagaagaagagttgttaactctagatattttggaaaatattttgagttttactaattgggaggagagcccaaaggttgaagaaatatatgaagacttgtttgaacaagtcaaaaggaagaagaaattcttaactaacgatttattagttattgactattatttcttccatctctatggaagaaaacagtttgacaaaaaactttttgaaaggattgtaaagagagtattaaatcaggaaatttggacagacgatgtctataatattgttttatttaatgatttgatggctatcgctgctttgaagatttttcacaattccttttcagacttcttaacagttgtggataaagcattagccgttatagaaaaatcacaattctatagctataaacctagtgtttttgttctcaaagctaaatatgaacttctgcataagggaaataagaaaaaggctgcagagaattacgataaggccataatgtttgcttccgttttagaagactcggttttagaagaaagtataagagcagggaaagcggcagatggtttatagaaatggtggtgacataaatgtcactacttttttaatggttaaatgtttactatagaaacataaataacagttaaaaggagttttattttgaaaaaactaaaattatttacactattctcattacttatcactatcttgccttatttcacaggttgtctttaataaggggttaccatgtcaaaatatccatatatttcacaggttgatcagcgtgactgtggtgtcgctgccttggccatgattcttaaacactatggttcatcttatagtttagcttatttgcgggaattggctcagacttctcgtgaaggcacttctgcgcttggtttggtggaagcggctaagcagttgggtcttgaaactcaggccattcgtgcggatttagacttgtttaaacaagaaagcctatcttatccttttattgcacatgtggttaaagaaggtggactgcaacattattatacagtgtttggtcaaatcaaagggaagcttgttattggtgatccagatcctagcaagaaggtcattaaaatacccttagaggagtttgccaaagagtggacgggagttgctctcttttttgttccaggagaaacctacactaaatacaaagaagatgtgcctgggcttctttcatttttaccaattttgtttcgtcgtaagggattgattgcagtcattgtcttactgagttttctagtgacccttgttaatattattggttcttattatttgcaatctattattgaccgcttgattcctcaggaggcctacactcttctgacaatgatttcgctaggcctatgtatctcttatctagctcaacaagtatttacttttttcaaagattatcttctacatcgattggggaattacttgtccattgctgtcattcttccttatattaagcatgtcctttccctacctattagtttctttagttcacgtcgtactggtgaaatcacgtcacgttttggagatgccaacactattatcgatgctctagcttcaacgattttatcgattttcctagatgtgaccattgtgatgactttagctgtggctcttattttacaaaatcagtcactttttgtgatgactctcacggtagtgcctctttatgttttaatcattttggccttctataagctttttgaaaaggaaaattatcaattgatggaggcaaatagtcaggtcaataccgctgttattgatgatttgcgaggcattgaaaccttaaaatccttgagagttgaagaaagacgctatcaggaaattgaggtgaaattccatgactatttgaagaagtctttgtctaaggccaagtggcaattaacacaggatggtttaaagacaggggttcagttagtttccaatgtctttatcctatggtatggggcacaattggtcatggaaggacagctatctgcaggtcagttgattacctataatatgttgctgaattattttacaactcctttaattaatattatcaatctccaatctaaaattcagcaagccaaagtagccaataatcgtcttcaagaagtttatgttgtggataaggaagaaaaaggaaaacttaaagagttatcctttaaacaacttgctcttaagggtgttagtcaccgttttagttatcagcaagagacgcttagtaagattgatttaacgattcataagggggagaaaatcgccctcatgggtaaaagtggatctgggaaaacgaccttggctaaaatgttgtcgggttattacacaaaatctagtggtcatgtaaccctagataaagatgctattagccatgcggagctgcgtcaaatggtgacttacgttccccagcagacctatgtgtttacaggcactattttagaaaatctgctattaggatttgaaggagaagttgacgagaaaaagcttcttaaagtttgccaacaagctgatatcttagaggatattcaaaaaatgccactaggttttcagacccaagtatctgaagatggtggtctatctggtggtcaaaaacaacgcttggcgatagcgagagccctcttgtcccagcagcctatcttgatttttgacgaagctaccagtggtctcgatagtgatactgaaagcagggtcatggctaatcttgctaagattaaacgaacaatgatttttattgctcaccgcaatagtgttcgtcaacatgtcggtcgtgtggtgaccatggtgagtggccagattgagtcggacagtcctaatttcaatccattccagtttatttaaaataatcttcctattatatatgtagaaaacttaagtagtctaaatattcacatcttgcacctatctccttaatatagtatactggtagcatactattaagaggtgtaaacatgttagaggcatataaaaatttttggttaggctatattgatttttatggtcgtacaaaacgatcagactattggtgggttgtcttgattaatggagttattggtactttaattttcctactgatggacttccttggagaaacaaaggctgctggctttacattaacagctttcattttatttatagcagcaacggcgcttcctaccatttctatgcagattcgtcgtctacgtgatgccaatttcaatgttgcatggattgtattaaaagcgacaccactcctggtagtgctttgggtgatgtatgcctttcctacaagagattcaaaataacttcaatataaaaagagtgaaactagttaatctagttacactctttttttcttataaaataaagctacctaagaggctaacgagggtgaagctgatagttgcataaaatacagcgagacgagttgcctgaataggtttataaagtcgaattagtgttaggacacaccaaataaagagtactgtgacaaaccaacctgacagtaagcgacgtggcgtcacaccgtagagtgccatataaacaccaaagagtttccagccagcgataagggcaaagaggctagcaaaagtaaagagtagggtgcttaagaaacgaagccctttgtgggtgaagaaattttctttagaaaaaatgtaaagtccagctaggattcctaagttgagggtagaaactcgaaccaattgccagaagccttgaaccgcaatatgtgaggcttgatgggctggaatgctggcttggttgagagaaaggagttctcccatttgactagtggcagttaatatgaatagggcataagtgaagcagaggcttccgagtacgatataagctgctacttttgggaactgacgggtcgctttaagatggccttcaaatcgtttttgactgagtggcttttcttttgccaaataggttgcagcgagttgagcaaaaagtcctagagccagagggatactggtgattaaacgagagaacaataatccgttgtccttgaaggtgatagtgaaatcaagtagagtagcaagtgtctggaagaactgtcgccaaagttgtccgaaagcaggtaagacctgactaagctgactagcagcgaatacagttagtaccaaggcaatcatgatactaatgagaatcatccatttgtggttcttgattacgtgtttttcttcttcggagagttcttgtttaggtgctgttttatataggagtgtccaggctccgataaagaaatattttagcgggaagatgcagctggtgtatatgaggtctagccaaaccataattcctaaacgatcttgactactttgtccagtgcgtgccattaagtaaaggaggatacttgcatgaaggcaaagaatctgagcgctgccccagttgtcgtgcagaccccagagactaatttgcaagccttggaggagactagtgaccataaatattcccgattcaagtcgcattccctttgcttttccacctaataggcgacagcctagctcaatcgtactgatcaagacaagggttgctggaaaggcaaaggaaaaatgggtcaagtaagtgacatacaggaagcaggacacaagacaggcgacaatcagtcccttaattttccaaatgtcttttggtgaaaaatgttccaagaatttcttggttttggtttgaagactagtcttttcgtcggaatattcctgggagactagctgtaaatcagtagtgtagttatttgtttccatcataattctccttttggatttttgtccaaaaaagactttatcataaaaaacgtttgactttgttacccaactgtaaaattactaaaaataggtctatggacttaggtctggagaatgagttggaaaaataggcgagaaaaaaatataatgctcacattggatgatagattgtacggactatattgtcagaaacagtcaaatactaaaggaagttttttatagattaactgtttatttatctgggattaagcaaaggactcctattgagaattaccaaatgtaatgtcattttttgacaccacatgttagcttgactaatatgtaaatgttgcaaaatttctgaaaattcgttgacatgtgttgtcaaagtagtatgatattaatataaaaaacttaggaggttcttatgttaggtgtcatcctactctatgttggtatggttttgatgagtaatggactccatcgtttagagggtattcctgataagtcaaatgttgtcatgaatatctttacgggtggtttggggttgattctcaacattattgtcattgcttatggagcttgtacagggcaaggcgctgaatggttttatggtagcgccactggccttttatttgccttcacctacctttactcagctatcaatacgattttcgattttgatcaacgtttgtatgggtggtttagtttatttgtggcgattaatacgctaccagcagggattctttgcttaacatctggatacggtggtaatgcttggtatggtattatttggttcttgtggggtattctatggctaactgcctttattgaaattaaccttaagaagcacctagggaaatttgtcccttacctagctatttttgaaggaattgtaacagcttggattccagggcttttgatgctttggggcaagtggtaagcattgatttaaggaggaaaaacgatgcaattgacaatgcgtgagcaggaaaaaatgatgattagccttgcggctatgattgctcaacgacgtaaagataaaggaatcaaattgaatcatccagaagcggttgctttgattacagactatgtgcttgaaggtgcaagagaaggtaaaactgttgcccaattgatggatgaagctcgcaatcttttaacacgtgaagatgttatggaaggtattgcggaaatgattccaatgattcaagttgaagctacttttacggacagtacaaaactggttactgttcatgatcctattcagtaaggagaaatgtaatgattccaggtgaataccatgtggcgagtgagccaattgattataacggtggttacgaagccattagtcttgaagtgaaaaatgtgggtgaccgtgctgctcaagtgggctctcactaccatttttatgaagcaaacgaagctggtcttcagtttgatcgtgaaaaggcgcgaggcaaacgtctagatattccagcaggtacagccattcgttttgagccaggtgaaacgaaaacagtacaacttattgactttggagggaaacgtcgtatttttggtttcaataacaaggtcaatggtttcttagactagaaagaggacaaatcgatgagttttaaaatggatcgtgaagagtatgctcaacactacggaccaactgtaggtgatagcgtacgtcttggagataccaatctttttgcagccattgaaaaagactttactgtttatggacaggaatctaagttcggtggcggtaaagttttgcgtgatggtatgggtgttagtgctacggaaacgcgtgacaatccatcagttgttgataccattattacaggtgcaaccatcattgactatacaggtattattaaagcagatatcggtattcgtgatggtaagattgttgctatcggtcgtggtggtaacccagatacaatggacaatgtggactttgttgtgggtgctagtacagaagccattgctgctgaaggtttgattgtgactgctggtggtattgaccttcacgtgcactatatttctgccgaccttcctgaatttggtttggataacgggattaccaccctctttggtggtggtactggtcccgctgacggaagtaatgcaacaacatgtacaccaggtaaattccatattactcgtatgttgcaagctgttgatgatatgcctgctaactttggtttccttgctaaaggtgttggttctgagactgaagtggttgaagagcaaattaaagctggtgcagcaggaattaagacacacgaggactggggtgcgacttacgcaggtattgataattcccttaaagttgcggataaatacgatgtttcttttgcggtccacactgactctttgaatgagggtggatttatggaaaatactttggaatccttccaaggtcgtaccgttcataccttccacaccgaaggttcaggtggtggacatgctccagatatcatggtctttgctggtaaggaaaatattttaccatcatcaactaacccaactaacccatacactacaaatgctattggtgagttgttagatatggttatggtttgtcaccacttggatccaaaaatcccagaagacgtctcttttgctgaatcacgtgtacgtaaacaaactgtggctgcagaagacgttcttcacgatatgggtgcccttagtatcatgacttcagatgccatggcaatgggacgtgtcggtgaagtagccatgcgttgttggcaactagctgataagatgaaggctcagcgtggtccacttgaaggggattcagagtttaacgataataaccgtatcaaacgttacgtggctaaatatacaattaaccctgctatcactaacggtattgcagactatatcggttctgtagaagttggtaaatttgcagatttggttatctgggaaccagcacaatttggtgcaaaacctaagttggtgcttaagggtggtatgttaacttatggtgttatgggtgacgctggttcaagtcttccaacacctcaaccacgtatcatgcgtaaattatatggtgcttacggtcaagcggttcatgaaacaaatcttacatttgtctctcaatatgcttatgatcacggtatcaaagaagaaattggtttgaataagattgttcttcctgttaagaatacgcgtaacttgactaagcgtgatatgaagcttaatgactacgctccaaaaacaatccgtatcgatccacagacctttgatgtctttattgatgatgagttggttacttgtgaaccaatccatacgacatcattgtctcaacgttatttcttgttctaaggaagacgctatataaatgaggctggaatttttcctccaacctcttttgtattttatagccataacgtttttagtgcttcattaagttgctatatgagtttgatgctagatttttaaaatgtaatagaaaaggaaaaagtatgatttttacaaaagtagatgctcttgttaaagatatcgatgtggacaaataccatattgaaacagtcattctttcgagcgatgaccttaacaaaaaaattattcgtgtgaagagtgatcacgggaatgaatttggtattcgtcttgataagggacaaaaattgcaaaatggatctgccttttttatcgatgatcaccatgtcctagctattggtgttgagtcacaggatttgattgtcatttctcctaaagatatggatgaaatgggaattacagctcacattcttgggaatactcataaaccaattgaggtgaaagatgccaagatttatttggaagttgaccctgttgtagagcaagtattgactcaaaaagacattgcctacacgattgaggaagtggtccttgacaaaccccttcgtcacgtgaatttgactgcccatgaacattaatccttttgctaacgtgtctttgcgagactatcttgaaattgttcaaattgttgattcaacctttccaattggatcatttaaccactcttttgggatggaaaattatctgcgtgaagacactgtaacagatgataagggctatgaggaatggcaagaggcttatttagatagccaatttaagtatggtgaaggacttgtgattaagctagtctatgatgccatggcttctgatgatttggctcaagtttggcaatatgataagactttgactgtttcgacgcaagcgcgtgaaaccagacaaggaacgaagatgattgctaagcaaatgttgcgcctgattcaaaggctacatgctattccagtattagatgactatcagtccaaaatacgtaagggtgaggtttatggcaatcctgccattgtctttgcgctttatgtcttcaacaaggggattggttgcagtgaggccatagcactttatggctatagcgttatctcgactatggttcaaaatgctgttcgtgccattccgcttggacaatttgctggacaagagatcgttttacgtagcttttcacaattagaacatataacacaagccattcaagaacttgatgcgtcctaccttggggccaatacacctggtcttgaattagctcagatgaaacatgaaactcaggtgttccgcctattcatgtcctaaaatatcaacaaggttgagaggaaaaaaacaatgacaaaacgtactgtaattattggagttggtggacctgttggttcagggaagactcttttgcttgaacgtctcacacgacgtatgtctgacctaaatttagcggttattaccaacgatatttataccaaagaagacgcccttttcttggcgaaaaattcaagcctagatgaagaccgtatcattggtgtagaaactggtggatgtcctcatactgcgattcgtgaggatgcttctatgaactttgaagcgattgaaacccttcaagaacgcttcaatcatgatttggatgttattttccttgaaagtggtggagacaacttggctgcgaccttcagtcctgatttggttgatttcaccatttatattattgacgttgctcagggtgaaaaaatcccacgtaaggctggtcaagggatgattaagagtgatttgttcttgattaataagactgaccttgcaccttatgttggagccaacctagaccgtatgcgtgaagatacccttcatttccgtaacgaagattctttcattttcacaaatttaaataatgatgacaatgttaaggaagtggaagaatggattcgtaagaatttcctactagaggacttgtaagatgacacaagcatacgatggctttgtccatcttggattttcaaaccgaaatggtcgtacaatttcccacaagaaataccaagaaggtaactctcgagtatcagcggataattcagatgccaatggtgttccttactatttcctaattaatatgggtgggggctttgtcgagggtgagcagtatcaagtgaccattgatgttaataaagatgctcatgccttggtaacaacccaaacacctacctatgtttacaagtgtgaaagaggacagttgacgcaacaacatacgtccatcacacttgaagaaaatagctatttggagtacatggctgatgaagtcattccctatttaaaatcacgctatttccaaacaagtcgtattgatatggataagtctgcccacttgatttattcagatggtgtgacggcaggttggtctcatgaggatttgccgtttcaataccattattttcgtaatttgacacaaatctaccaagatgatgagcttgtttatagcgatcagaccctcttagagcctcagaaacaagatatgtttaaacttggttattttgaaggctggcgaaattataatagtttggtaatggtgtcaccaaatattgacgaggcttttgttaaggctttgcagaagcacttagaagatctgaatttagagtctgattttgctatttcatccttagatatcccaggtctggtgttacgtatcttaggaaaaactgctgaggataatcgtcgcgtcatttatgcctgtgcagactattttagacaagaaatacatgaattaacccctttgaatttgagaaaaaatgatatgaggagataaaaaatgcatattcctgaaaattacctaagccctacgacttgtgcggcaatgggggcagttatgttacctatttggtataaggctgtcaaggaggtaaaggttaaagttgatacggataaaaaaacgattcctatgttgggaatcgggacttccttgtccttccttatcatgatgtttaatcttccagctccgggtggaacgagtgcccatgctgttggagcagtgctaattgctatattgttaggaccttgggcttcctgtttagcagttagtgtggccctagctatgcaggccttgctctttggtgatggtggaatcttggcctttggtgcaaacgccttttgtatggccgttgttatgccttttgtaggttatgctgtttataaactcttgaataagtggacaaagaacaggataattgccagcttttttggaggttatattgggattgtagctgcagctctgactgttgcagttttactaggaattcagcctattctctttaaagatagcagtggtaatccgctttacaatccatatcctttgagagtgacccttccagtaatgggcttgactcacctcctcatcggtctggtagaaggattcttcacggctggtgttcaagaattcattgaacgtttgaatattgataatactcaggaactaacgactaaaaaactacgtcctttattgctctttatcctagccttgattatcctaacaccacttggtttattggcgacgggaacagcttttgcggaatgggatgtcaaagagttggtagaaaaattggctcattatcatgtggaagcccaagcgccaaaaggaatgttgaatggtttctcattcaatgccctcttcccagattatagtatcgcaggtgttccagaagtcttgggttatatcctgagtgctgcttctgctgttttgattttcttcatcctctatcgcttgattttcggtagaaaggttgaaaaatgattctgccagaatggatgtcggaagagcgccctgtagtcactaaagtcggtagaaataactttcttatacggaatcgtcaccatctggaagctcttcttcaaaagtttgaaacgcatcctttaaaagtagtatcagtctttcatccaacagctaaggttttacttctctttttcttacttatttcagtgggaattagccgaaatctcacagttttgtggattctagccttgtttttaggagctggagtggcttttctgccacattctattttagtaagaaccttgaaaaagacagtagtgttgttgatttttcctttagttctttatctaccacatctcttacttagcggaggtcaatcgctctttctttttagacttcctttgattgctgtagccattgcttattattcagaaacgagtacaataagtgagatgttagcggcattaaaaggattgcattttcctgatcttgttctgctccagttagatatcaccataaaatatattgatgtctttggaaaacaattgatggatttgctcaaagggattgaagcgcgaagttttggtggcaatcatcgtttccggattggaagtaatatctggggaattttataccttaaagccatacgctatggtgaggaactgactcaagccatggaagcacgttgctttgttggtgagtatgtcaagtcatcacagtcattcacatggaaagactggctggccttgataagtctagtagcagtgattttaggacagattctgttaggaggatgagatgtttcaattgaatcaagtggcctgtgcctatgaacaaaaaagggtctttactggtcttgatttggagattaaacaaggacaatatgtgatgttgatgggggaaaacgggactggaaaatcaagtctgatcagtttattaactggcttcaagcaggaagaatctggacgcattcttttcttagggaaggacctaaaagaatggttgaaggataaacgtcaaaaaagagatttttatagtcgcctcggaatcctctttcaggatgtggatagtcagttattcaatagtactgtctatgatgagattgcttttggccctcgtcagctaggtctaactgaagaagaagtatcaaagcgtgttcaagataccctatccttgcttaaaattgaggatttaagggatcgcgttccctatcaactgtctggtggagaaaagaagaaagtggcctttgccagcgtcatggtaactaatccagatgtctatattcttgatgagcccttcaataatctttctaaagaatatgaggaattttttagggaacttctacatgagctccattcagctggaaaaacaattatcatgtctgctcaccactttaagcaccttcatcatgaaaaggctgatgttcttctttttgaagatggcaaagctgatttctttactgcccaggaagtgctcaataaccagcaagtgattgagcgtttgtcacattattaataagtataagtagaaaatcgttattggttttctactttttctttgtcaaacaattgatatttttaggtgatagtattttcttatcaccttgattatgtttaagtattagttaaggctagtcaattttgttacaataataacaatcaatctcaaaggagacaattatgaaacttaaaaaaattcttggaattacgggtgtagctattgcttcagtagcattgctcgctgcatgttcatctaaatcatcaaaagaagtctctaaatcttcaggtgctaaagaaacaattaactttgccactgttgggacaacagcaccgttctcatatgaagaaaacggtgaattgactggttacgatgtggaagtggctaaagcagtcttcaaggactctgacaaatatgaagtgaaattccaaaaaacagaatggtcttcagtatttacaggtcttgactcagctaaataccaaatggctggaaacaatatctcttattcagaagaacgtgaccaaaaatacctcttctcatatccaattggtaccacaccagctgttttgactgttccaaaagatagtaatattaagaaatatgatgatatcgctggacactcaacgcaagttgttcaagggacatcgacagcgacacaattgactgaatttaacgataaacattcagacaagccagttgagcttaactatacaaatgaaaatattacacaaatgttgacaagtttgaatgaaggtaagtacgacttcaagatttttgatgcaccaactgttaatgcaatcatcaaaaataataaattgagcaacttgaagactattgagcttaaatctgatcaacaaccatacatctacttcttgttcgcagataaccaaaaagaccttcaaaaatttgtaaacaaacgtttggaagaactccaaaaagatggtactttggctaagttggctgaaaaattccttggaaataaagattatattccaactaaagacgctttgaaagttccaagcaaaaaataagaaaggagctgggaatgattctcagctttttcatataattaaaatctaggacacgttatagttaaaaactatagagatatacaattataaacaatttgctacaattctcaacctatgggataataattttacacttaaaacaattaaagggagttcgttatgaaacttaaaaaaattcttggaattacgggattggcagtcgcttcaacagtagctttggctgcttgtggtgctggtggtaataaatcagctaaagatgataaaactttgacagttggtatcatgactttggatgatacaactgagccattgtgggataaagtcaaagaattggctaaagacaagggtgttactatcgagttgaaagagttcacagactacaaccaaccaaatgaagcccttaaaaacggtgaaatcgatgttaatgctttccaacacatttatttcttgaacaactggaacaaagaaaataaaggtgatgttgttgcggcagctgacacacttcttagcccaatccaccttttctcaggtactgaaaacggaaaagctaagtataaagatgttaaagagcttccagaaggagctacaatctcagtacctaacgatggtacaaacgaaagccgtgctttgacacttcttcaaacagctggtttgattaagttggatgttaaagatggtgaattggcaactatcaagaacatttctgagaatccaaagaaattggatatcaaagaaatctcagctgaacaagctgcccaaactctctcatcagtagatgcagcggttgttaataactcatacgcacaacaacaaaacgttaactatgatacaactctcttccaagaagaaccaagtcaagatttgaaagattgggttaacatcattgcagctaataaagattgggaaaaatcaaataaagctgatgctatcaagactttgattaaagcctaccaaaacgatgaagtagcacaaatcatctatgatgcatctaacaaggttgaccttccagcatggaaaggtgccccaacacaagatcaattgaaagctaattcaaagaaataagctaaggacagagggcgtgtgagagcacgccattttgtcgtgtatgaaggagacgatttgatggcattttcaagtgaagaagagcagttacgaaaatttcgtaacgatgaaattgctcagcactattttgaagttttgcggactttgatttctaaaaaatctatttttgctcaaaatattggtctctatgatgtggctgcttaccttggtgagattttctctggtgttggcgcagaggtgacaattgacgagacctatacggcaccttttgtcttggcaaaatttaagagtccaaatccagatgcgaaaacaattattttctaccaacactatgatacggttcctgcggataatgatcagccatggacagatgagcctttccgtctgacagttcgtaagggctacatgtatggtcgtggtgttgatgatgataaggggcatattacagctcgtctgacagcccttcggaaatatattcgagaagttggcgatcttcctgtaaatattacgtttatgatggaaggagctgaagaatctgcatcaaccgatcttgaaaagtatttggaaaaatacagagatgaccttcttcctgcagacctattggtttgggagcaaggaaatcgaaatagcaaaggtcagttggaaatcacagggggcaacaaggggattattacctttgatttgtctgtcgagagtgctgatgttgatattcattctaaatttggtgccgtgattgaatcggcttcatggtacttgctcaatgctatttcaagcatgagagatgatcagggacgtatccttatcgacggcatctatgaaaagattgtccaaccaaacgaacgagagatggatcttatcgaaacttatgccattgaaaatgcagatagtcttcgtaagatttacggtttaaaactacccattttagaaagtgaccgccgagctttcttaaaaacttactattttaagcctgccctttccattgaaggcatttcaacaggttatcagggtcaaggagttaagaccattttaccagcccaagccagagctaagatggagatgcgtttggttcctggcttgacgcctgagtacgttttggagtgtatcaaggctcacctcaaaaaagaaggatttgaccgtatcaaggtgaccttcactcttggtgaagaaagttatcgtagtgatatgtctgatccagctattgtcaatgttattgagttagcaaaaggcttttatgaagaaggcgttgctgtgcttccaacggcagcaggtacagggcctatgcatatgattcatcaggctttgggtgtaccaatggcagcctttggcatagggaatgctaatagtcgtgaccatggtggggatgaaaatgttagcttagcagattactacacccacattgaactaattaaggagttaattgcaagttatgagtaatgtcattattgatttgaaaaatattgatatcacctttacgcagaaacgccgcactattcaagcggttaaggatgtgtctatccagattgaaaaaggtgatatttacggaattgttggttattcaggggctggtaaatctacccttgtacgcgcaatcaatcttttgcaagtgcctacagctggtaaaatcactatcggtaaagatgtgacttttgcagatggtaaggtccaattgtcgacaaaagaattgcgtcagaaacgtcaaacgattgggatgattttccaacactttaaccttatggctcaaaagacggcttatgaaaatgtagcctttgctcttcgtcattctaaactaagcaatgaagagaaagacaaaaaaattcgtggtcttttggaattggttgatttggctgatcgtgcggaaaactatcctgcacaattgtcaggtggtcaaaaacaacgtgtagcgattgcgcgtgccttggctaatgatcctgaaatcttgatttcagatgagtctacatcagctcttgaccctaaaacaactaagcaaattctttcactattgcaggatttgaataaaaaacttgggttgacagtggttatgatcacccacgaaatgcaaattgttaaagatatttgtaaccgtgttgccgttatgcaaaatggtcaacttttggaagagggcagtgtacttgatatcttctcaaatcctcaagaagatttgacacaagaatttattgaaactgcagcagggattgaagatgccttggctaagattaatgcacaacctttggtgaaaaacttaccaagctcagcccttctcgttcaacttaaatatgctggttcttcaacagatgagccactcttgaccgaacttttcaaagagtacggagtttcaagtaacatcctttatggtaacgttgagattctaggtgatactcctgttggtgaattggtcgttgtcttggatggtgaagcggatcaggttcttgctgctcaaaaagcgattgaaaatgcaggtgtcagcttgcaagtacttaagaaaggagcccaataatggcagattggattcaacaaaactttccagatatttatcgtatcggtatgcagggggttaactcttggccagacgccatctatgcgactctctacatgacggttatttccttcatcattgggggacttcttggtcttgttatggggctcttcttggtattgacaggtcctcgtggagttattgaaaataaatttgttttccaaatcttggataaaatcacttcaatcttccgtgccattcctttcattatcctcttggcgattttgaaaggattcacttactttatcgtggggactaacctcggtatgacagcggccttggttccattgtcagctgcaaccttcccattctttgcacgtcaagtacaggtggtgcttgcagatcttgaccgtggcgttattgaagcagcacaagctagtggtgcaacactttgggatacgattaaggtttaccttagtgaaggtctacctgagttggttcgtgtatcaaccgtaactctgatttccctagtcggtgagactgcaatggccggtgctatcggtgccggtggtcttggttacatcgccatctattatggatataaccgttctagtacatcagttaccattttggcaactttcttgattttgattttgattttccttatccaattcttgggtgatttcttgactcgtaaattgagtcataaataggatttgagagcctgtttgctacaggcttttctcatgtcttgacgatttcagatatttatcatagtatggaagctatcgaatgcttatggttaagctaaccataaaaaaggagttaatgagttatgaaacgttttatttcaacttggaataggaccagtctaattaagcgtattgccattggtgtggtagtgggtgctgtgcttggtttgcttgttcctaagtttacggttattggtctcttgggagacatgtttgttggtggtttgaaggcaattgccccacttttggtctttgccttggttgccaatgccctttcccaaacgcgagaaggtcaacaaagcaacatgaagacagttattgttctttatctctttgggacctttgcggctgctttgacggcagttatttctcactatatttttccaatttctttgaagttgggagcagctgcagcgactaaagcaacggcacctcaaggtgtgggagaagtttttaaagatttattgcttaagatggtagataaccctgtcaatgccttggctcaagccaattatattggtgttttggtatgggcagttgtctttggtttcgccatgcgaacagctagcaatcatacgaaggatttgcttaataccttggcagaagtgacgtcacaaatcgttcgttggattatcaacttggccccatttggtatccttggtcttgtctttaatactatttctgagaatggtgttggtgttttggcagattatggtatcctaatccttgttttagtgggaacaatggcctttgttgccttggttgttaatccaatcattgcttttgtgatgatgggcaaaaatcctttcccactagttttccgttgtttgaaagactctgggattacagccttctttactcgctcgtcagcagccaatattccagttaaccttcaactttgtaaggatcttggtttgaatcctgatacctattcggtttctatccctttggggtcaactattaatatggctggagcagccgtgacaatcaatgtcttaacgcttgctgcagtaacgactttgggaattcaggtcgactttgcgacagcactcattcttagtgtggtttcagctatttctgcttgtggtgcctcaggtattgctggaggatccctcctattagtgccagtagcatgtagcctctttggtatctcaaatgatttggccatgcaggttgtcggtgtcggctttatcgtaggtgtcatccaagactcctgtgaaacagcccttaactcttcaacagacgttctctttacagcagtagcagaaaagagccgttggaagaaagcatagctaattgtataaggtcggcctatttggctggctttttgattttagagaaaacatagtcaaagactatagctagctcaaggatctatcatctttaaaaagcccataaaatatggtaaaataaaccgttcaaagagaaaaagtgaaacatttatgactaataatttattggtgcttcaatcagactttggtttggttgatggtgctgtttcggccatgattggtgtggcccttcaggaagaacctagtttgggagttcatcatctgacacatgagattaccccctacaacacttttgaggcttcttatcgtctgtttcagaccgttgaatactggcctgaggggacaacctttgtttcggtagttgatccgggtgtaggtttctcacgtaaaagtgtggttgccttaacaaagacggggcaatatatcgtcacaccagataacgggacactttcttatatcaaaaaggttgttggtatcgtggctgttcgtgagatttcagaggttgagaatcgtcgtagcaatacagaactttcttataccttccatggtcgtgatgtttatgcctatacaggggctaaattagcttctggtcatatcagttttgaagaagtcggtcctgagttacctgtggacaaaattctagaacttccagtggttgaaaccatcatagaggataatttagttcgtggtgcgattgacattttggatgtccgttttggctctctttggacctctatcacacgtgatgatttttacgctttagacccaaactttggtgaccgctttgaagtaaccatctttaacaatgatatgttggtttatcaaaatcaggttacctatggaaaatcatttgcggatgttcgtattggtcaaccaattatttatatcaattccctctatcgtgtcggtttagccattaaccaagtgtcttttgccaaggcatataatattggtgtaggctctaactggcacattgaaattaaacgtttaggagattaaagtaagattatgaagaataattcaattcgtacagtagttgcgacaggtattggtgcagcactctttattatcattggtatgtttgttaatattcctatttttgggaacactagcatccaacttcagtatgctgttcaagcactattctcagttgtttttgggcctattacaggtttctttatgggctttattgggcatgcgcttaaagatggcattcaatacggaaatatctcatgggcttgggtacttgcaagtgctattacaggtcttgtgattggtctatttagtaaaaaatatgacgtcacaactggcaagttctctttgatgagtatgatttggtttaacctagtacaagcattggccctccttattgcctatggtatcgttactcctattggtgatagactccaatttgcacaagcctggtcatacctttatgcacaaagttttgtagctggcgtagctaactttattacaattgcaattggaggaaccctccttcttgcaatctatgctagctcacgtacacaatctggtagtcttaccaaagactagcatgaatcataggagagtgggactgtcagtttgttttgatacctcctctcttttttagtagaaacatggataaatacattagttttaatcagtttacatttcaatatgatgcgcaagcagaagcgacgcttaaagatatcagctttgatattgccaagggcgagaaagtcctaatcttaggtccttctggtagtggaaagtcgactctagctcagtgtctcaatggtatcatacctaatattcataaaggtcaggcacaaggccaggtaaggatagatggtcaggatatttttaagcaatctatctatgataagtcacagttggtatcgacggtattgcaggatccggatggtcagtttattggcctaactgtagccgaggatttggcttttgctttggagaatgattgtgctgatcaaagtgagatgaaagataaggtagccctctgggctgagcgtctagacttgacctctcttttgaatcaccgccctcaagatttatcaggtggccaaaagcaacgagtcagtttggctggtgtcttgattgatgagagtcctattcttttatttgatgagcttctggcaaatttagatcctaaatcaggacaggaaaccattgatctcattgataagatccacaaggaggtgggagctacgacgattattattgaacatcgcctagaagatgttctttatcgtcccgttgaccgcattttactggtcaatgaaggagagctcatctttaatggtagcccagatgagcttttatcgagtacgctcttgctagaaaatgggattcgcgaacctctatatgtgacggttttacgtcagttgggatttgacacaaggagtgcacaaaatcttagtcaattagatgctttagacttatctgaccttgctctgccagacagagttttgaaagataaaagagacagttcgagtgactctattttgaaggttgaggggcttagtgtttcctatggagataatccaacaattatagaggatctgtcctttagcttgaaaaaaggtgagcgactagcgattgtcggtaaaaatggggctgggaagtcgacgcttgccaaggctctatgcggttttgtccctagtcaagggaaattaacttacgagggtcaggatattagtcaggatagcattgccgagcgttcagaacgtataggctttgttttgcaaaacccaaatcagatgattagccaaactatgatttttgatgaggtcgctcttggtttgcgtttgcgaggtattgaagaggctgaggttgaagagcgtgttcatgaggtcttgaagacttgtggtctctatagttttcgtaaatggcccatttctgcgctttcctttggtcagaaaaagcgcgtgaccattgcgtctatcttagttttgaaacctgaaatcattatcttggatgagccaacggctggtcaagattacaagacttacacagatatcatgaatttcttggacagtcttcaaaagcaaggtcatacgattgtgatgattactcatgacatgcagctcatgttggaatatagcgatcgttgtctcgttgtggttgagggtgaaatcattgcagacgacaagcctgttacaattcttaatcagaaggatttactagagtcagctaatctcaagcagacctctctttatactttgggtcagaaattgtcaagtgatccagtagaagtaacccagtattatatcgaaaaaggaggccctaatgtctaatcgtttaattggttatcagtcaggtcaaggtttcctctatgatttgtctggggcaagtaagatgcttttctttatcttggtttcagttgcctgtatggcaacctatgacccacgctttatcctagcggtaggcttactttccatttatctcttttatttggctaagattcgttggcgagatatttcttttgttgttaagattattggatccattgccctctttaatttacttatggtctaccttttcgcacctggttatggtgaagaaatttacggggcaaagacagttcttattgaaggctgggggcgtttctatctaaccagtcaggagcttttttaccttgcaaatctattgcttaagtatttttcaacggtccctcttgccattctttttcttatgaccactcatccgagtcagtttgcggctagtcttaatcagattggaattccttataaatttgcctattccgttagtttaaccttgcgttatattccagatgtccaagaagaattctttacgattcgtaaggctcaagaggctcgtggtttggatttgtcgcaaaagtcgggattggtcaaacgtattcgcgggaatctccaaattgttcttccactaattttttcatctctcgaacgaattgataccatatcgacagctatggagctacgtcgatttggtcgctataaaaaacgtacctggtatgtgcataaatctttgatgaaacaagattaccttgtcatcgtgtcagctattcttttattggggattagtataggcttaatcttcctcaatcatggtcgtttttacaatccatggggatgatattcttggcttttagtaaaagtatgctattaagcacaactaaaaacgttccagtcttgtctagatgaacgagattggaacgttttttgttattttaaatatcctaaataatcaaatttttctagtgttcgattgtcagcgacaactagtatgatcccttcatcaggtagtttcttacttgggtcaaagtgggtgtttaacttgccacttttctcatctctaaaaccaataacattgacgttataattttgtcttagatttaaagtatgcaaggactttccagcccattcactaggaattttaagttcaattaaagctacatcgtcctctaaatgaaaaacatttgatatgttatagcggaggatatttgaagccaattcttttgctgtgctacgttcaggagtgatgacccagttagcacccattccgtaaaggacttcctcataattgttattcatagctttggcaataatattcttaataccaagttttttgcactgcaagagcgctagcgcagacgattctaggtgttctccagttgcaataatgactgagtcgcaagtatcgataccagcagaacgtagaaattcaatgtcagtaatgtccccaacagcagccttagtcacctgatcagcaaggaaatcaattgttgtagcattattatctaaggcaataacatcttgtccaaaagaagagagttcggttgcaatagtttgtccaaagattcccaaaccaaggaccccaataatttgtgttttcatataaaatcctttcagaatattgtcaattaataaaatagtttagccgactgaaatgtcagttggggcataagagatatgtttttcttttttggtcatcaagctcaagagaacagtgataggtccgacacggccaatgaacatcagagccatgataacgaggcgtcctagggtatttagattaggggtcaaatccattgaaacaccaacggtagcaatggctgatacactctcaaaaagtaggcctagtggtgagagtgtaggattagtttccagcaaaataacatagccgacaaagagcatcgttaggaaaaagagtataacagtgaatgcttgcaaaatggttttgttagatataatacggtttcgaaaaaccacgctcgagttaccagatagctctgacttaaaaagtaggaacatgatagaggcagttgtcaccttgataccacccgcagttcctccagggccacccccaataatcatttgaatcataaaaagaagatttgtggagaaatctgcattggtataggaaatagttgcaaagccagcggtacgcatggttacagtctgaaagaaacttaccagaagttgttgccagatattgagagtaccgattgtcttagagttatccatttccagtaaccaagcaagtagtgttcctcctaataggagacaacctgtacttataagcacaagacggctttgattactgaaaggtctacaagctaatttccaattccttggacgatctttaatataacgtcttattagttgaatcaaatcaatccaaactgcaaatcccaagcttccagacatgatgagaaaagctacagcaaggttaatggttggattggttgcataatcttgtaaactgttagaacctaagttatcaaatccagcattacaaaaggcagagacagctagaaagagactattaaagataccatgaccaagtccaaaacgaggaatgaaatcagtcataatcacaagtgctgccatagcttcaatagaaaaagttattttatagaccttaaaaagataagccttcaaatctttttggttatccctactaagtgcggattgaaggagatcttgatcgctcagtcctaatttatttttaagggtataggtactaaaggctataagagagactagtccaagtcctcctgtctgcatgagaagcatagagagaatttgaccaagaccattgtatgccttactgaccgggacaacagaaagtccagttacacagaccattgacacagtattgaagagatggtctaggtagcttgtttctggactgttagcatagtggcttatgggaaggctaagtaaaatactccccactataatgacaaagacaaagctgagcacaagcttttgcgtgacagaaagacgatttatcaatgaaaacctccgagttatcataagaataaataataatccaaggagcaaggaacatccttggataaacgttataacggcttcttgttaggcatcccagcacgacgtgggtacttatttggggtttcttttttcttatcgacaatggtgatattacgtccatccccatttggcagtttatagttctcattgagaataggtttggcaaaaagcaagttcaaggcatttttagcatcggctagctcttcgtcagctgctgcagctttaagtgcaataagttgtccacccacctttaagaaaggaatggtcaattctgagagaacctgcatgcgtgcaacagcacgggcagttacaatatcaaactgagcacggaagcccttgtcttgtccaaaatcctctgcacgtccatgatagaagtgaacaccgctgagctcaagttcatcagccaatagatttaggaaattgatgcgtttattaagagagtcaatgatagtcacatcaagctcaggacaaaggattttcatagggagacttggaaatccagctccagctccgatatcgagaagtcgaatagtctgatttttaatatgtccttggagaacaggagctagggaatcgtagaaatgtttgaggtagacctcgtctctttctgtaattgcagtaaggttaatcttttcattccattctaccaagagctcaaagtagcgttggaattggtctttttgtttttggctgagatcgaaccccagttctttcagagccttgtaaaaatcttcaggtgtcattttatattccttttatctagtttcaatgctcttattttaccataattaagagctttcatctaacgctataagacagatggaaactaggtctgagtaagtttctcattagctttgaaaaatgttctaagtttaagaaatatgtaatattaaaggtgttattttttcttaaaaatttgatataatactaattaagtctaaaatcataatcatgctctctaatgaaaagtgaatgtaggggattatggtcttgtggattgaaaatagatccctatggggaaatttaatttgaggattaaaaatgatttatctttcagaagttagaaagtctccagaagggctcgcctttaacgaagcaccttctttgttggagtctattaaagaacgctatgatcaagttttaaatcttgaacagattcaagcaagtgggcaggtagcctatgacaatggtttgtaccttttggattatcaacttagctatgatattaccttgccatctagccgttcacttgaacctgtgacccttagttttaactatccagtttcagaaacctttatacaagaggcagatgctgctcttcaaaaggaattagtcgaagaaaatctagttcttatcttggatggggataccattaatcttgatgagagtattctagataatattcttcttaatattcctttgagagtactaacacctgaggaagaatcaggacaaatttcgctctctgggaatgactgggaagtcttgtcagaagaggactttgccgcacttcaacaggagaaaaaagaggcaagtaatccctttgcccaattgaacggtctttttgatgaaaattaattcaaaaaaacaaactaaaaatgtttgacaattttaaaaatctatattattatatcattagaagttaattttcggatttattcattgggtagatctacagactttttaagggaaatggaagtcaaaaaattttaagaaagtggtaaatacttattatgagcaaacgcattttgattgttgaagatgagaaaaaccttgctcgttttgtctctcttgaacttcaacacgaaggatacgacgttgtgacagcagacaacggacgcgaaggacttgaaatggcactcgagaaagatttcgatcttattctcttggaccttatgttgcctgagatggacggttttgaagtaacacgtcgtctccaacaagaaaaagatacttatattatgatgatgacagctcgcgattcaatcatggacattgttgctggtttggaccgcggtgctgatgactatattgtaaaaccatttgcgattgaagaactattggcacgtatccgtgcaaccttccgtcgccaagatatcgaagctgctaagaatgcaccagcaaaagcatcaacttatcgtgatttgaaattggatgttcaaaaccgtacagttgttcgtggtgatgaagcaattccattgacaaaacgtgagtttgatttgttgaacacacttttgagcaatatgaaccaagtgatgacccgtgaggaactcttgcttcaagtttggaaatatgatgacgccatcgaaacaaacgtggtagatgtttatattcgttacttgcgtggaaaaatcgacgttccaggtaaggaatcatatattcaaacagtacgaggaatgggttacgttatccgtgaaaaatgagtaaattacaagataaattatttggtaaagtaaccattagaaaaaagttgaccatgacaactgctgtggtcttctttcttgtattgtcgatgttcactctggttgttgttttctcagcaaatacgctacttttgcaacgtgaacgtcaaaatgtaaacactacaatctcaaaagttgttacttatatcgaaaaggactgggactccgacgaagagttgagtccagaaccgcttttagcggccctttattcacctaaaaatatctatgcatcgatcattaatggcgtgctttccgaaaagcactctttggatggtcaggttgcgatttctaataaattatattctaaccaatctgtttttgtttatgacaaaaagggaacgtttatctttacttctgaggagaacacagattcgcctccaggtatgtccgaggtaaacaaactgaagtcagtttcctataaagggaagcgtggtttcttgctacaagttccaatctacggtaaagataaaaagaccatcgttggttatgcccaaatcttccatgatttggaattctattatgctcttaaagagcgtttgattttcttattgattttcctagaagtggggatgacggtcctagttatcgcagcgactgtagttgtcttgacatctattctgcgtccgatgagacagttgcacgaaacgatgggagtaatcaccgattcgccaagtgatttggaacttcgttctaagattgaaagtcacgatgaaattggtgatttggcggttaactttaaccgtatgatggataaaatccaagaaaataatcagatgcagatgcgcttcttgagtgacgtcagtcatgaattgcgtacaccgattgcggttatcaaggggcatatggacctcttgcaacgttggggtaaaaatgaccctgagattcttgaggaaagtcttgaggctgccagtcacgaggccaaccgtatgacgattatgattaatgatatgttggattctatccgtgtcaaaggatcatttgaaaatcacagaaacgatacttgtgatttgaattcttcaatccgtacggttattggtaacttccgtgtcttgcacgaagactaccaattctatctcaatgatttcgagagctcagagcgccctgcacagatttacagccaacactttgaacaggcgattacgattttgattgataatgcggtcaagtattctcctgttaacaaggaaatccaggttacaattaaggctctggaagatgaaatgttggtacaagtgcaagataatggtgaagggatttctaaagaagatattgagcatatctttgagcgcttctaccgttcagataaggcacgtaaccgtacgacaacgcaatctggtgttggtattggtttgtcaatcctttaccaaattgtggaagcttatcgttgtcgtatcgatgttagttctgaacttggtgttggaacacgtttcgacctttacattccatttgcggatggaggaacgacgacacctcagcttgagctttaaatcaatttataagagacttaaagtgattcttggtcatgagcacgcctcgtttagggcgtgctttttatgtgtttttatggtaaaatagagtaccgaatttcaaagattggtggtgaagtgcatgcgttgtccaaaatgtcaacataataaatctagtgttatcgatagccgtcaggcagaggatgggaataccattcgtcgtcgtcgtgagtgtgattcttgtcatgctcgttttacaacatttgagcgtgtggaggaagttccacttttggttgtcaaaaaagacggtacccgtgaacaattctctcgcgataagattttcaatggtatcttgatgagtgctcagaagcgtccggtttctagtgaggatatcgaaaatgccatcacccgtattgagcaaaacattcgtcgtaaccatgatggagaggttgatagtgatgtcattgggaatttagtgatgaaagaacttgctgaccttgatgaaatcacttatgtacgttttgccagtgtctaccgttctttcaaagatgttgatgagattgaagagttgcttcaagaaatcaccaaaactgtacgtgcgaaaaaagagtctaaaaaatgagacctattgaagaatttgtctatgttggcaatcaggttatcgttcccgatcaggcaagtttgatgcgttgctattatcccattattgggagtgagggatacgctctctaccagtatttcgtggctttttatgacaatggtaatcaccgccataagtttgcggctattctgaaccatcttaactttggaatgcagccccttcaggaagcactggcggttctgacagcagtagatctcttggccttttaccactcacctcaaggggtttatgttatagagcttaagtctcccttatcaattgagcagtttctaaaacatgccgtttatagttcacttctcgagcaaaagattagtgaaccagcagtagatgctttgaaaccggcaggtctacaaggcttgcaagatttatctaaacgtttttcggatgtctttaccgatgagcgtttgactcaaaagtctgtgtctgaaatcaagcctaaaaattcgtttgatttaagcagtttcaggaatcgtatgcaggctgacggacttgtatttacagatgaaaagacagatgtgccagaaatctataaattgtctgaaactcatggcatgaattggtatgatacctatctcttagcgaaaaagacagccgtgaaccaccagattattgtcaagcgtatgcaggtgcaattagaacaggctcaagctcaaacattgggtggtgattctgctttgacggagacggagaaaaagattcttaaagcggttaggtccgaaaagcctatagattacttgcaaagtgctaaaggcccaagcgggactgtgactaattctgagaagcagattctcacggatttggcacaaagaggctttatggatgaggtaattaacctcatggttgcctacagtttgggacggacacgttcaacgaatgtaaatcgagagtatatctctaaacttgccaacgattttgcctttaagaatatcgtcactgctgaacaggggcttttagctttgcgtagtggttacgataagaaatcacagcaagcaaaagctgattctaagaagaaaacaaatgtgccgagctggagtaatccagattatgataatcaaaccagtcaggctgatcaggccaagttggatgaaattagacgtcgagctttggcaaaactagaaaaaggaaaggagtagcctatggaaagagttggacaaaccctaaaccgaacagggcatcatgggtctggcaatgcaacagatttaacgaagcaaattttagcggatccaagagtggctagctttattcaagagcatagcctaagccaggatgaaatcaagcgtagtcttcctaagtttaatcaattcctggtggaatgccgtaaggtaaaggaaggtgatgcctcgtatattgccaaagggtatgaaccgattctgaccatgaatgaaggctacgctgatgtcacctataaggagacgcgtcagctcaaagagcaacaagaacagcaggctattgctaaacggattaatttggtgagtctgcctcagtcttatcgtaagattacctttgcggacattgctctagatgatgtggctcgtgttgatacctttgagagtctcgtggattttgtggcgaattaccctagtccagaccagaaaggcctttatatctacggagacatgggggttggaaaatccttcatgttggctgctatggctcatgaactttcagagaccaagaaggttgcgacgaccattattcattacccatcatttactattgatgttaaaaatggaatcaaggatggttctgtcaaggagcaaattgatgctgtcaaacaggcggaagttttggttctagatgatattggtgcagaacaattctcttcttggattagggatgatgttttgcaagttatcctccagcatcgcatgattgaggagctgcctaccttctttacgtctaactatagttttgcggatttagaagctaagctatccaatggacgtcaaggagacgagacttggcaggccaaacgtgtgatggagcgtatccgttttcttgccaaagaggttcacttgaagggtgttaatcgccgttagggtgatcctaataatgataaagaataagagagtttgctttccttggtggaagtgagactgctaaatgaagaaaggaatccctatttaatcagggacttaaacatatgacattacctacagttgctatcgtgggtcgcccaaacgttgggaaatcgaccctatttaaccgaattgcgggtgaacgtatctctatcgtcgaagacgttgaaggggtaacacgtgaccgtatttatacctctgctgaatggcttaatcgccagtttagcttaattgatacaggtggtattgatgatgttgatgcaccatttatggaacaaattaagcaccaagctgacattgccatgactgaagctgacgttattgtctttgtcgtttcaggtaaggaaggcgtgacagatgcggacgagtacgttgctcgtattctctataagaccaacaagcctgttatcttggcggtaaataaagtggataaccctgagatgcgtgcagatatctatgatttttattctcttggacttggtgatccttatccagtttcatctgttcacggtatcggtacaggggatgttctcgatgctatcgttgaaaacctcccaacagaagttgaagaagaaaatccagatatcattcgttttagtttgattggacgtccaaacgtcggaaaatcaagcttgattaacgccattttgggtgaggaccgagtgattgccagcccgattgctggtactactcgagatgccattgatacaaactttgtggacagtgaaggtcaagagtataccatgattgacaccgctggtatgcgtaaatctggtaaggtttatgaaaacacagaaaaatactctgtcatgcgttcaatgcgtgccattgaccgttctgatatcgtccttatggttatcaatgccgaagaaggtatccgtgagtatgataagcgtattgctggttttgcccatgaagctggtaaagggattatcatcgtagttaacaaatgggatacgattaagaaagacaatcataccgttgctaactgggaagcagatatccgtgatcagttccaatttttgagctatgcaccaattatctttgtatcggctgagacgaaacaacgtcttaacaagttgccagagatgattaaacgcatcagtgagagtcagaaccgtcgtatttcatcagctgttttgaatgatgttatcatggatgccattgccatcaacccaacaccaactgacaaaggaaaacgccttaagattttctatggcacacaagtttcggttaaaccaccaacatttgttatctttgtcaatgaagaagagcttatgcacttctcatacatgcgtttcttggaaaatcaaattcgtcaagcctttggttttgagggaacaccaattcatttgattgctcgtaaacgtaaataaaaaaagagaccaaccagaatagaatttttatgggttggtcttttatcattgtaaggagaaaacgatgttagaaaatgttcaagcttatttatctaaacaaggtgttaagtatatcaaacctgaaaaagccggtccacatcaggaagagatggaagacctcaaggcacttggtcaagcagctcgtaaggagatgcagactttagcaaaacttctagaggagcgtttggcaccctttaagatggatcgtgtcagtaattgggctaatcaagcacaaatatgtcgtccgcacttttggtgctattacagggcccctgaggatagtttagaagatgttgctatggcgattcgactttatggtcagcctgaaaaatgggggatttcagtagaagttagctttgtcgaacggaaaaaatcagatactactttagctaagcaacataaggtcctagacttaccgattgcaccctctctatactattttgcccaggaaaatggtgttagtcatcgtgtggaaggaactgaagagaatcgccagatgcttaaagaagcagttagagatggtcgtgttcgtaaggtcttggtcaagtatgatgtccctgtgactgctagtgaaacaatggaagagttggtagaagaactcgctgatggattctataagttgaaaccatactacgaggaagctaatcaaaactaaaaaaatctccagtttttctggagatttctcttatttattttggtgaaatcacttcagcaccacccatgtaaggacgaagaacttcagggatagttactgaaccatcttcgttttggtagttttcaaggatagcggctactgtacgtccaacagcaagtcctgaaccgttaagagtgtgaagaagttttaccttaccatcagcttcgtcacggtaacggatttgtgcacgacgggcttggaaatcttctgtgtttgaacatgaagaaatttcgcggtaagtgttttgtgctggaatccaaacttccaagtcgtaagttttcgcagctgagaatcccatatcgccagtacacaaagtgatgacacggtatggcaagttaagtttttgaaggatgttttcagcgttaactaccattttttccaactcatcatatgagtcctcaggttttgagaatttgaccatttcaaccttgtggaattggtgaagacgaatcaaaccacgtgtatcacgaccagctgaaccagcttctgaacggaatgaagggctcatagctgtgaagtagattggcaattctttaccgtcaaggatttcaccgcggtagtagtttgtcaaaggaacttcagctgttgggataaggacgtagtcagtaccgtcaagctcgaaagtatcttccttgaattttggatattgaccagtaccgaacattgagtcgtggttaaccatgtaaggtgtgatcatctcagtgtaaccttctttagcgtgctcatccaacatgaagttgtagatcgcgcgttccaattttgctccaaggcctttgtagaagaggaagcgagaaccagtgactttagcaccacgttcccaatctaggataccaaggtcttccccaagatcccagtgtgctttaacttcaaaatcaaagtcacgaggtgttccccaacgacgaacttctacattttcatcttcgtcagcgcctacaggaacagagtcatttggtgtgtttggaagtgtcacaacgatggcattaagcttttcatcgatagcagcaagttctgcatcaatctccttaatttctgcagagactttttgcattgctgcgatttgttcggaagcatcttctttgttacgcttagcttgagcgataccatctgaagcaatgttacgttgagctttgagttcttcagatttgataagaagttcgcgacgtttaacatcaagctctttgagttcatttaaagtttcagtagcgacaccacgtgtagccaacttttcggcaagggcatcgaagtcgttacgaatacgttttacatctaacataagttcctccaaaaagtaaaacactccagtgaaagtgttggagtgacttaggccacggttccatccaacttcacaggagtgcacttgtttatgtttttaattattagaaacggtagaatttcgtaggttaaccctacctgctcgcagcaaccgcaggctttctgtaagggtctagctagtacttatccgtctgttatattatacaaaaattatgattttttggcaaataaacctttgagtcgagcgccaatagtttgaataagagttggtagcttgacgactttttcattgccaagatgttccctagcaatctttagaattttcccagaatctttagaagcaaagaggaatttgctcttgtctgtcaacacttcaaagtggcggctaattctctttcctgagacattcgcaccgatttgtgtgatgctagtccatgggatttgaatgtattgctcgacattgacatctgggtagaattcaagagccacatctcctattagaaatttaccgactttccctccgatagccatgtaggaaacgcctgttgtatgcagttcaactgttttgtttagtgattgtgccatatctatctcgcttttttacttgtagtacctttattatagcataagaaaagagttcagctttgctaaactcttactctttttacatgattccgaagaagcttgcaacaataccaactacaaagagtccgatgatgattgtgattggcgaaactttcttcttaagcaaccacatacatgcaaaagtaaggagaagtcccatcaaacctggaatcaatgaatccaattgtttttggagggtatcaacttgaatcttatcgaagctaagtttgtcattaacttggccgaggatagtcttaagttggtcaccactgacattgcctttaggccattcgatataggcacctttagacaaaactttacctggaaggtttacagtgaagacgatagaaacccaacgttcaacaaggacagccaagatgaacataccaaggattgatgcccctttagtaatatctttcaagataccaccagacatgtctttagtgatttctgaacctgctttgtaaccaagttcttgagtgtaccacaagaaggccatacggataaggttccaaccgatgaagaagataagtggaccagcgatgttaccagcttgtgccaatgatgcaccgagggcaccaaggataggacgaactgtgaaccagaaaacagggtcaccgataccggcaaggggtcccatcataccgattttaaccccttggatagcagcatcttcgatgtcagtaccgttagctttttcttcttcaagagccaaggtaacacccatgataggagcagctacgtaagggtgggtattgaagaattccaagtgacgtttaagagctgcggcttggtcttctttgttagtgtagagttttttgatagcaggaatgagtgagtaagcccaacccaagttttgcatacgttcatagttccatgaaccttgcaagaattgtgagcgccaccaaacctttttacgatccgcttgagataattgaattttttcagccatgagagcaccccttcctagtagtcttccaagatatcgccgattgggtcgcctgaaccagttgaagttccgccaccatttccgccaccttgtttagaaaggttgaggtagatgaaggcaatagcgacaccgatagcaccaagagcgataagtgtcaattggctaatagcagcaaaagcaaaaccgatggcgaagaatggccaaacttcacgagttgccatcatgttgataaccatggcgtaaccaacggctacgaccataccaccaccgacaaccataccgtggttgagccagtcaggcatcaatccaagagcatgttgaacagattctgctgggatagcaagaagaagggcagctggcacagcaatacgcaaaccttgaagaaggagggcgaggtagtgtgcgcgttcaacaccagcgatgtttccgttttctgcagctttatctgcggcatgaacaagggcaacagatgctgtacgaacaagcatagttaggaagagaccggcaaccgcaagtgggatagctgttgcagtcgcaacaccgataccttcagttgtgaagttaccacctttaaccaaaataatggcagcagcaacagaggcaagggcagcgtcaggagcgacagcggcaccgatattagcccaagcaagggcgatcatttgaagagaaccaccaagcatgatacctgcagtgaggttacctgtagcagcaccgatgagggtacatgcaacaagtggttggtggaattggaattggtcaaggataccttcaagaccagcaaggaaggcaacaactacgaccaaaattgcagaaataattgacatatctgacatggtaataattccttttctattgagttgtgattagctgagattatcaactaatttatctgaatgaaggttattgaacgttagcttttttgataaggtcgaacaaatctttcttagaatcatttggtaccttacggacgtcgaattcaacgccaaggtcacgcaatttttcgaagcaagcaacatcgtctttgtccatagacaaaacgttgttaaccattgttttaccagttgagtgagccatagaaccaacgttaagttctttgattggcacgccaccttcgatagcacgaagtgcgtcttgaacagtttcgaacaagataagcgcgtgtgtgttaccaaagcgagggtccttagaagcatcaatcaatttttgaattggaacaacgtttgctttaaccccatttggtgctgcttgtttgattaattctttacgaagctcatctttagcaacgtcatctgaagcaacaatgatacgatctgctttagaagcaggtgtccagttagttgctacttgaccatgcaagagacgtgtgtccaaacgtgccaagttaatcttgagcttaccatctccgataactgtcccttctgggatagctccttgaggtgcagcagcttctacaggagcggctgttgtttcctcagctggattaagctcctctggaagcgccttgataccacccttagcttccttgatgatattagcagcaacttgctctgcagtagcgttagcatccatcatacgttcagtgtatgcttggattagcattggcaagttaagtcctgtgatgatggcaatcttgcgatctggattttctccagcaattcggctagcttggttaaatggtgaaccagaccaaaggtcagccaaaacaagaatttcatcatcagcatcgaattgtgcaatggcgtcgttgaagtgagcgtacaaatcatcaggaccttcacttggcatgaaagttacgacttgaactttctcttggtctccaaaaatcatagagcctgattggtggatcccttcagcgaacttaccatggctggcaataataataccgatacccattcgtgttctcctccttataaattattttttcctaggcttaaaaagactatctccgatttttatcaagacgctaaaaaaagcgtctctcaatctttttaaacataagaaatcaagaacaattatattgtaaaacgctttcacgcagatgtcaatagctagtgagaaaaaatttcaaaagaagtcaatttctttcaaaaatgagcaaaacattataaaaagattgcccaaccattagattggacaatctttttataatactcggagattatttcttcttgacaatgagtcggaaaagattcttaaagccttgtttgagaacaacgatgaagctaggtgcttttcttaaactttctcgaggaattcttttttgaatttctttcaaagttattcggctttttcgactggcaaaacggaaacgtccattttgcttagtacggatttcaaagcgtgggatgaacttaccaccgaagtagacatcggcaatcacataagtgacttcatcccaaggaatttgaacgtagtcttgtaacttcgtatcattgtaaaattcgaaggccttatcaccgaccatgatatttccgtaaataggtccttcacgaaaccaagttcccttagttgtgtgagccatttcggtattgagcgatttaaccataccttgctccgattagagtagaccaataatgtggagcacaatagcaaggacaaagatacctaagatgataacgattggagaaacttttctcttaagaaggtacatgcagaggaaagtcaaaccaagggcagcaagaccaggaatcaattggttcaagttatcttgcaaggttgtcactttgttaacgtcaagagagcgaccagcagcttgttgatggaaggcttctttaacaccggcaataccttttggaagtttatcccaatcgatataagctccttcttgttgtttaacagtagagacaactggtgtgaaggtaatgcttacccaacgttggataagagaaccgataacgaacatccccatcattgatgcgccacgagttacttgttgaagaaggttaccagacacgtcgtctgtaatcgcagcgccagctctataaccgaactcttgagtgtaccatttaacagcggcaaccataacgttccaaagaacgaagaagacgattgggcctaggacgttacctgaaactgccaaacctgctcctagtgaaaggaagatcggacgaagggtaaaccagaagagagggtcaccggcacctgcaagaggtcccatcataccaaccttaacccctgagatagcggcatcatcgatgtccgcaccgttggcacgttcttcttccaaagcaagtgtaaccccaaagattgggttagccatgaaaggttgtgtattgaagaattccaagtggcgtttaagagccgcagctcggtcttcttttgattgataaagttttttgattgctgggataagagtgtaagccacaccaccattttgcatacgttcatagttaaatgaagctaaaaggaagtatgagcgcaagaaagctttgaaacgatctgcttttgttaatttaatttttgaatcagccattttctttcctcctaattaaaaatcttccagaatttcaccgaggggatcacctgatcctccgtcgtttgaagaacccaatgaaccactagcttcaagtgcaaggtacataacggcaaggcagagaccgatgatacccaagctaatcaaggtcaattctttgagggcagccaaagcaaaaccaaggaagaagaatggccaaacttcgcgactagacatcatgttgataaccatggcataaccaacggctacaaccataccaccaccgattgtcatacctgatgttaaccattcaggcatagattcaagaccagattgtacaaggtgcgcaggaatcaagagcaagaggagggcagggatagcaacacggagaccttgaagggccataccgataaagtgccatctttcaacaccagcgatatcagcctcttcagcacgactatccataatgtgagagatgaagacagttgcagtacggacaaacattgtcaaggcaagacctgcaacagccaaaggaaccgcaagggcgatggctggaccaattcctttagctccttgaccacccaagataaggataatcgtagaagctacagcggcaagtgaagcatctggtgccatggcagcaccaacgttagcccatcccgaagtaatcaactgcaagctaccacccaacattacgccgagttcgagatgaccagtaacaagaccgataagggaacaagccacaactggctggtatgtttcgatttggtcgttaactgagctacaaccgatgatgaaagcaacaattacgactaaaataatttgtactaaactcatttatgcatcctccaaaattatttcttctctgctaatttagtttcagctgacttaatcaaggtatcaacgtttgctgggctatcacttggtaccccacgaacgtcaaatttgacacccaatgattgcaactctttgatagcatccacatctgtttggtcaaatgaaagagctttagtaacgttgacttttccttctttataagctgaagaaccaaggttgatttctttaatatcaacacctgctttaacagcagcaagagcctcttcaacagattcaaagagaagcatagcacgtgtatcaccaaaacgtgggtcattgtttgctttaaccatgtttttaattgggataacgtgaacttgaacaccagatggagcggcttgtttaatcatgtttgtacgaagtttatcatgacaaacagtgtctgaaacaacgatgatacggtctgggtgagttgagtgagtccaaccagtcgcaacctgaccgtggaggagacgtgtgtcaacacgagccaaaacgtatttgatttttccatcaccaagtactgttccttcaggaatggtacccttaggaatagaaggtttagcgtctgctggtttagtgtcttcttcaggaataaggccttctggaaggactttaacgccttcttttgtttccttataaatgttagcgacaatctcttcaaccccagcatcaggagctaccatacgttccgtatatgcttggataagcattggtaagttgagtcctgtcacgataaccatcttgcgatcaggattttcttccttaattcggcttgcctggttaaatggtgatccagaccaaaggtctgcaaggactagaatttcgtcgtcagcgtcaaattgagcaatggcatctttgaagtgagcgtacaagtcgtcaggaccttcatttggcatgaaagtaaccacttgaactttctcttgttcaccaaaaatcatagaacctgattggtgaataccttcagcgaatttaccatggctagcaataataataccgatacccattagtgttcttcctccttttatatattgtttcttaggaatagaaaaatgattattggtattagcatcgatcagtatgaaatgacaacaatatttttttagtccctcgaaaattagaacactctaattataggacgttaccatgaatttgtcaatggttttcgtaacaaaagtgtcatataattgaaaaaaacatcaaattattgcaaatatacttttttttcagacaataagtgttaaatatagttttaagctatatttaactagaggaaataggattaagaaaaaatgagataaaagcttgtaatagctggtgttggctgctataatttcttcaattaactatttaaggttaaatctataagaaaagagggcctccttatgtcagatttactaagtatttataatgaattgcaatctaagaaatgggttgacttgacccacaaaattaatgcggaaagtccacatttcccagcccttcctgctttgaaacaagaagatcttttcacattaaaagatggtttccatgttcaaaaatttacagtggttggtcaatacggaacgcatattgatgcaccgattcactttgtagaaggtggtcgttggttggatgagattgccctcaaagatcttcttttaccactctatgttatcgacaagtctaaagaagttgctgcgagtccaaactttgtcttgagcaaacaagatatcttagactttgaagcagaacatggacgaattgttgaaggggcctttgtcgcttttcgtagtgattggtcgaagcgttggccagatcaagatgctatgcgcaaccttgatgaaaatggggttcagcaaagtccaggttggagccgcgaagctctagaattcttgattcatgaacgccatgttaaggctgtcggtcatgagacttttgatacagatgctggtattccagcagcagaacatggcttggttaacgaatactacctcttggaacaaaacatttatcaggtagaagtcttgaaccaattggatcaagttccagccgttggtgctttgatttcaattgcatttcctcactgggacaaggcgacaggttccccagtgcgtgcagtggctattttaccttaatcagaacaaaagacaccgaagaaattttcagtgtcttttcttgtttataaaaagagttcttgaagtttgcgagcaacgccatcctcttcattagtccactcaatttgttcgttagcgtggggaagaaggacagagctagcattcttcatggcataaccagttttagcaagttccaacatctctgtgtcattgtgttcgtcaccaaaagcaatcaaatcatccgttgatttacgcatggccttaagtaagtagttcagggcgtaggccttgttaatacctttaggcgaaaattccaaaatattaagtgggccaccccaagaatcaacttcaatttcttccttgaagtctttcttgatgtcatcggctagttggtacttatcttcatggcgagtttgcataaggagagcgttagggttgcgcgtgattttagttggttctaaacgcatagcctcaataattttatcaacaccaaagagttgtggttgaatacgctctgggtgattcatagtgatatagaagtgttttcgatattcactagccagaaaatccatctctaattcatcatggcgttgtaagaggctaatcagatatttcttatctaatttaaccgaatgctcataagcccagtcttggtctggaagattggtcaaagagccgttgaaggtgatgagtggtgtttctaaccctagtgttttgtaatggtcaatagccatacgataaggacgacctgtagcaataacgacttggtgtcctttgttttgtacgtctttaatcgttttttgtgtaaattctgaaatagttccatctgggcgtaataacgttccatcaagatctagtgcaatcaatttttttgtcatgttcctattatagcaaaaatctgtcctttgttggtgattaagaaagagctttctaagaacgttcggtttttcataagaaaagtctcaggaaataaaccttgcaccgtcaaatgatttcatgtagaatagtaatgttgcattctacatgagaatgttccgaaattattcggattttgacaatattttttattaaggagtctaaactttcatggaaaagtttttcaaattgaaagaacatggtactgatgtccgcacagaagtgactgccggattgacaactttctttgccatgtcttacatcctctttgttaacccagcgatgttggcccaaacaggaatgcctgcacaaggtgttttcttagcaacaattattggtgcggttgcagggacattgatgatggcattttatgctaacctaccatacgctcaagcgcctggtatggggcttaatgccttcttcacctacacagtggtcttttctttgggttacacttggcaagaggccttagcaatggtctttctatgtggtgttatttcattgatcatcacggtaactaaagtacgtaagatgattattgagtctattccaacagctctcaaatctgctatttcagcaggtatcggtgttttccttgcctatgttgggattaaaaatgctggtttcttgaaattctcaattaatccacatacctacactgtagcaggtaaaggtgctgacatggccaaggcgtcaattacagcttcatcgtcagctacaccaggtttggttgccttcaataatccaactgtaattgtaggtttgattggtcttgcgattgcgattttctttattgttaaaggtattcgtggtggagttcttctttcaatcctcgtaacgactatcattgctatttttgctggtgtcgttgatcttggaagcatcgattggcacgcagctagcttgacatcatctattaaagatcttggtcaggtctttggtgcagcgcttggatctaagggattgggatcactctttgcagacgtttctcgtttgcctggtgtctttatggctatccttgccttctcattgactgatatcttcgatactatcggtaccttaatcggtactggtgagaaggttggtatcattgcttcaacaggtgataacaacgaatcaaaagctcttgaccgtgctctttactctgaccttgttggtacaagtattggtgccattgcagggacttcaaacgttacaacttacgttgaatctgcagcaggtattggtgctggtggacgtactggtttgacagctcttgtggttgctgtactctttgccatttctagtttctttagtccagtggtgtcaatcgttccaaatgcggcaacagcgcctattcttattattgtaggtgttatgatgctctctaaccttaagagtgtcgattgggaagacttgtctgaagctattcctgccttcttcacttctattttcatgggattctcatatagtattacctatggtatcgcagctggtttccttacttatactttggtcaaaatcgtcaaaggtcaagctaaggatgtccactttattatgtggattttggatatcttgtttatccttaacttcatcagtatggctgtgttctaaagcttgaaagttaaaagtctgtatatttgtcaggctttttcttttgcgattttatctggggaatgtgagagagtttttttgattaactttcaaatctatagtaagttttacaaaacgatttctaatctatgagtgattgatgtggttaaaataaattgaagattaaaatacatatcttaacttcttacttaaatgattcaatatttataagtttctactgtatttttacagtggattctagtccatatttttattttttgatataatgaaaacatgatttacagtcaaaatgaagaagaattgattagtatcggccaaaagctaggtcgactgctcgattctggagatataattgttctctcaggggatctgggagctggcaaaacgaccttgactaagggaattgccaaaggtttggatatttcacagatgataaagagtccaacgtatactattgtaagggagtatgaggggcgactgccactctatcatttagatgtctaccgcattggtgatgatccagattctattgatttagatgattttctgtatggtgaaggtgtgacaatcatcgagtggggtgagctcctagatgagagtctgttaggggattatctcctaatttcgatatctcatcatggagatggacgtcagttgctttttgaatctttcggtcctagaagtaaggagattcaggaggaaatgataaatggctgagcaagaattagtcattgaggaagctcaaagagaggatgctgcctctctagctcgtttactagagactgtagccttggaatcggattttctagcacaagatgatagaagttctatactgagtgctgaacagttagccacttatattgaaagtcatcagcataggcttaatgagatttgtttggtggcgaaattgggtcatgaggtcattggtgtttgtaatgttacctctgatcaagatactaagaccagtcatattggcgacgtatttattgcggtttctaaaccctactgggggaatggtgttggccagtttcttatggaaacaatgattgactgggcagatcatacaccaactatccgccgcttagagttgacggttcaagcacgtaataaacgggcggttcatctctatcaaaaattcggatttgacattgaaggcactaagaaacgtggtgcaagaactaaaaatggagaatttctagatgtttaccttatggctaaactcatagattaggaaaaaacatgaaacttggacgaaaaattttattgatgttgttggcgatttttgcaacgacagtagtagctgctggtatttacctaacgacaacttataattacgccacaggcgaattgtcaaaaacgtttagggcttctaaagcaacttcagggaatagtaaggctattcaacagactaagcctataactattctcttgatgggggtagatacaggatccaaagaacgtaaggaaacctgggaaggaaactctgataccatgattttggtaacagtgaaccctaagactaagaaaacaaccatgaccagtttggaacgtgaccttttgacagatattgaggggtcgggtgaagcaaaactaaattcagcatatgctgagggtggtgctgacttggctatttcaaccattcaaaaggttttagatattgatattgactattatgcactgattaatatgcagggtatgattgatttggtagatgctgttggtggtattgaggtaacgaatcattttgattttccaatttcgattgcagaaaatgaacctgaatttcaggcaaaagttgagcccggaacccataaaatcaatggtgagcaagctttagtctattcacgtatgcgttacgatgaccctgatggtgactatggtcgtcaaaaacgtcaacgtgaggttattcaaaaggttgtagctaagctattgaagatggactctattggttcttacaagaaaattttgtcggctgtaagttcaaatgttcaaaccagtatcgatcttggtgataccaatactttgcgtagcttgatgggttatagtgatgcccttaaaaatattaagtcctaccaattggctggttcggatgccatgatcaatggtggaagttatcaagtagcttcaactgaggatattcttaaggtacaaaaccgtattaagaaggaagtcggtaagaagaaagtttctgaatctaatcttaagactagtttggttctctatggttctggtagctctaactatggctcagatgatttcgttaattctaaaggaagtgcggcttcgagtgaagcttcttcaaattatgaggctgggacatctgaggcagctggtggtggatcggtaagtacctacaatggaggtactacctatagcaataactatagtgaaaacacaggtaattatgttcaggaacaaggtacgacaacccctacatacaataataatggatcgggtgtaactacttatagcactgttccagcgacgcaataaataaggttgggtgattcccaacctttttgttatgaaatgatagcaatatggttattccttgcaatggcttttgagctatgctataatataggaaaataacgaaagagaggcggagtagaaacttcgtctcttgtgtgtgtaaggaggtcataatgtcgcaaaaaattattgatctcgtgacggcagtcgtagctccagctattcctgagccatacgaactggtcgatatcgagtacgaaaagcttggcggtgactatgtcttgtcagttttgattgataagccaggaggtattactgtagaagatactgcagacttgactgaaattatcagtcccctcttggatactattcagcctgatcctttcccggatcaatacatgctggaagtttctagtccagggttagagcgtcccttaaaaaccaaagaagctttgacaaatgctgttggtcagtatatcaatgttagtctttacaaggctattgataagatcaagattttccaaggtgacttggtggcctttgatggggaaaccctaacaattgattaccttgataagactcgccataaaactgttgagattccctatcaaacagttgctaaagctcgtttggcagtcaaactctaaaactattagtgtaaataaagaaaggatgccagttttggcctttagaggttaaaacaacaaagaatatgagcaaagaaatgctagaagccttccgtgtcttggaagaagaaaaacacattaacaaggaagacatcattgatgccgtggttgaatcgcttaagtcagcctacaagcgtcgttatggtcagtcagaatcagctgtagttgaattcaatgaaaaaacaggtgattttcaagtttataccgttcgtgaagttgtagacgaagtctttgatagtcgtttggaaattagcttgaaagatgcccttgctatcagctctgcttacgaacttggcgataagattcgttttgaagagtcagttgatgaatttggccgtgttgcagcgcaatctgccaaacaaaccattatggaaaagatgcgcaagcagatgcgtgaaatcacttataatgactataagcaacatgaaggtgaaatcatgcaaggaacagttgaacgctttgaccaacgtttcatttatgtcaatcttggaacgctcgaagctcaattgtcacgccaagaccaaattcctggcgaaagctttaagtcacacgacgtcatcgatgtttatgtttataaagttgaaaacaaccctaagggtgttaacgtctttgtaagccgtagccatccagaattcatcaaacgtatcatggaacaagaaattcctgaagtatttgatggaactgtagaaatcatgagcgtgtctcgtgaagctggtgatcgtaccaaagttgctgttcgcagtcataaccctaacgttgatgctattggtactatcgttggtcgtggtggaagtaacatcaagaaagttgtcagccgtttccacccaacacgtttggatgctaagacaggaattgaagttcctgttgaggaaaatattgatgttattcaatgggttgaagatccagctgaatttatctacaatgctattgcaccggctgaagtggactatgttctctttgacgaagatgatagcaaacgtgcgacagtagttgtaccagataacaaattatctcttgcaattggtcgtcgtggacaaaacgttcgtttggcagctcatttgactggttaccgtattgacatcaagtcagcttctgaatatgaagcactcgaagctgaaaaagctgaggctgctactgaggaagttgttgacgagattgttgcagaagatgctacacctgttgaagtcacaacagaagaagtaattgaaacaacagaagcagaataagaagaacatagaggtgtttgatggctaaaacacgaaaaatacctttacgcaaatcagttgtctcaggagaaatcattgataaacgtgatttgctccgcatcgtaaaaactaaagatggtgagattttcattgatccaacaggaaagcaaaatggcagaggtgcttacattaaactagataatgaagaagctctccaagctaaaaagaaacgtgcttttaaccatagtttctcaatggatgttcctgaaagtttttatgatgaactcattgcttatgtggatcacaaggtcaaaagaagagagttaggtcttgaataacacagaaaaattgtcaaatatgttaggactggcacaaagagctggaaaacttatttctggcgaagaacttgtcatcaaggcagttcaatcagggcaggcgagactagtttttcttgccaatgatgctggtagtaacgtgactaaaaagacgactgataaatgtaactactataatatagaagtctccacagtgtttaacgcactggaattaagcatggctattggtaaaccaagaaaaacggttgctgtagttgatgctggattttcaaagaaaatgaggactcttatggaataaagaataggaggacatcacgtgtcaaagaaacgattatatgaaatcgcaaaagaggttggtgtagaaagcaaggttgttgttgcaaaagctcaagaacttggtctttctgtgaagagccattcctcatcagttgaagaagctgatgctaatcgtatcacttcaagtttaaaagggggaacagctaaggctgaaagcaagccagctcctaaagcgacaccaactcctaaagaggaaaaggtagcgcctaaggttgataaggtacctgttgccaaatcagctccagctaaagaaacatcaaaggctgaagtcaaagaagcccctgcgactccgaaaaaaccacaaagccgtaattttaaggcagaacgtgaagcacgtgccaaggcagaagcagagcgtcgtcaaaacggcggaggccgtgacaaccgtaatcgtaaccgaaatcaacaagggaacgatcaaggtaaacgtcagaataatgatcgtcgcaaccaaaatggaaatggtcaaggcaaccgtaataatgggaaccgcggtaacaatagtaatcgtgaccgtaatttccaaggtaaacagcgcaatgatcaaggtcgaaataaacgtaacgatgctgcccgcaacaatcaggcaggtccacgtattgactttaaagcgcgtgcagcagccttgaaagcagagcaaaatgcagaatattcacgtcaaagtgaaacacgcttccgtgaagaaaaagctgcagagcaacgccgtgcgaaagagcaagaaaaggcaagaaaagaaaaacaacaggctgaagtcgctgctcaaaaagcagttgctgaagctaagccagctcccaagccagcaccggctgctcaaccagctccagctgcgcaagcacaagatacacgtcgtaaaaaggcacgtccagataaatcacgtgataatcgtcgcgagaatgaagatggacctaagcaaacaagaaataataagtggaataatcaaaaccaagtgagaaatcaacgaaatagtaactggaataaaaacaaaaataaaaaaggtaaaaataaccgtggtaattcagctccaaaaccagtaacagagcgtaaattccatgaattaccaaaagaatttgaatacactgaaggcatgacggttgcagaaatcgcaaaacgtattaaacgtgagccagctgaaatcgttaagaaactcttcatgatgggtgttatggcaactcagaaccaatctcttgatggggatactattgagttgttgatggttgactacggtattgaagcaaccaagaaagaagaagtcgataatgctgatatcgaacgtttctttgttgacgaagactacctcaataaagatgctatggtagaacgtgcaccagttgttactatcatgggacacgttgaccatggtaaaacaacccttcttgatacccttcgtaactcacgtgttgcgactggagaagctggtggtatcacacagcatattggtgcctaccaaattgaagagggtggtaagaaaatcaccttccttgatactccaggacacgcggcctttacatctatgcgtgcccgtggtgcttctgttacagatattactatcttgattgtcgctgcggatgacggtgttatgccacaaactattgaagccatcaaccactctaaggctgctggtgttccaatcattgttgcgattaacaagattgataaaccaggtgctaacccagagcgtgtaatcggtgaattggcagagcatggcgttatctcaactgcatggggtggggatagcgaattcgttgaaatttcagcgaagtttggtcaaaatattgaagaattgcttgaaacagttcttcttgtggctgaagtggaagaacttaaagctgacccaacagttcgtgccatcggtaccgttattgaagcgcgtttggataaaggtaaaggtgcggttgcaaccctccttgttcaacaaggtaccttgcatgttcaagacccaatcgttgttggtaataccttcggacgtgtccgtgctatgaccaatgaccttggtcgtcgtattaagactgcagcaccatcaacaccagtttcaattactggtttgaacgaagcgcctatggcgggtgaccattttgccgtttatgaagacgaaaaagcagctcgtgcagccggtgaagaacgtgccaaacgtgcccttatgaaacaacgtcaacaaacacatcgtgttagtcttgataacctctttgatacccttaaagctggtgaattgaagactgttaatgttatcatcaaggccgacgtacaaggttctgttgaagccttggcagcatcacttcttaagattgatgttgagggtgttcgtgttaatgttgttcactcagcagtaggtgctatcaacgaatctgatattactcttgcggaagcttcagatgctgttgttatcggatttaacgttcgtcctacaccacaagcacgtcaacaagcggaaactgatgaagttgaaattcgtcttcacagcatcatctacaaggttatcgaagaaatcgaagatgccatgaaagggatgcttgatcctgaatttgaagaaaaagtcattggtgaagctattatccgtgaaaccttcaaagtttctaaagtcggaacaatcggtgggttcatggttactagtggtaaaattactcgtgattcaagtgcccgtgtgattcgtgatggtgtcgttatttttgatggtaaattggcaagcttgaaacactttaaagatgacgttaaagaagtcggaaacgctcaagagggtggtttgatgattgaaaactataacgatattaaagttgatgacgttatcgaagcttacattatggaagaaattaaacgttaattttgttagcttttaagaaagcttacttaggagacaaagctaggtcatctggcctggcttttgttccatcataataagagagaaaggataagactatgggaaattcatttcgtgtagaccgtgttggtatggaaatcaaacgtgaggtcaatgaaattcttcaaaagaaagttcgtgacccacgtgtgcaagatgtcactatcacagatgtacagatgcttggtgatttgtcagctgctaagattttttacaccattcattcaaccttggcctcagataaccaaaaagcacaaactggtcttgaaaaggctactgggacaatcaagcgtgaacttggtaaaaaattgactatgtataagattccggatttgacctttattaaagatgagtctatcgaatacggtaataaaattgatgaaatgcttcgtaatttggagcgtaaagactaagaaaaaattcctgtcagttatggcaggaattttgcgttataatagaataaaaaggaggacttcaatgaaagtaacggtctatttgggtgctaatatgggtgataatcctagctttaagaaagcaacaattgccttgggtcagtggattgctaaaaatgggcataccctagtctatggtggcagtaggatgggacttatgggagttcttggtgatacggttttggaaaatggtggacaggctcatggcattatgccacaattcctcaaagatagggagatagcttatgaggggttaacctcaatgaccatagtagaaactatggcagaacgaaagactgccatgctagagcaaggagatctctttatcgcccttccaggaggtttagggacactggaagaaatctctgaagctattgcagctgctcgagtcggtaagttggacaaaccctgtgttttcttcaatctcaatggctattatgatgctatgaaaacgatgttagataccatggttgctcatgattttttggaggctgaaacagcagcaaaattcctctttacagatgatttttcagaaattgcagcttttgtccagtcttatgaaccacctcaattgagacgttatcggtaactttatatgataggttagctctctaagtttaaaaggagagcttttttgatggagagacgttagtaattatttttttcttttaaatttcagaaaattaactaaaaaaaccttaacaaaaatggtggatttgtatataatagtgtttgtaaatttaatcatttaacaaattttcctcatcatctgtgagtaatatccatgaatacttagtaccccacttggttaggaaaactttgccaatcatttatttttatggggaatgtgggatataggatgaaatggaaggaatgataagtatgtctattatggttaaacatgtgagttttgatgactatcaaaaaacacagacaaactataaagatgccaactttttacagtcagctgagatggctaagcttcagctaagccgtaatcatatcggagaagtagaggctctggtttttgaaagggatggcctgcggataggtcaagccatcgttgtctatagaagaagctttcgtatctttagaaaagctctcttgtttcatggacccttgctagattacaattctatagctgatttgacagaccttctagaggccttgatactctacttaaaaaagaaaaatattgcatcactttctatccatccctatcttaccgatcttattaggaatgaagaacttgaaatcattgaagaagaaaaggctgatgaggtctccaaggtatttgaaaaattaggttttgagcagtatttagatccagaacaggctctagttgttaatcagatgtttgtaaaaccaattgatacctttacgacttctgatgagatgctcgcagctttttcaccatctttgaagcgagatttaaaaaaattcactgctttgcatgtcaaagttgaagaactacgtgaggacaatctcaatcagttttatgacatcctagttcggacagcagagagaaaaggattttcagttcatccattgacctatttccaagatttgaagaggaactttggagaatctgcaaagtttatgttggcttatttggattgtccagcttatttggcttatcttgatgagaatattaaatcttttgaagctaagattcaggctttaaaagatggcccacagaaaaaacgaaccaagggtcagattgcggatgccgaagatcagcttagaagttactataaacgtttagagcaatttaagacctaccaagtcactggtgacaaattacctctttcggcctatctttttatggattatggttcagaaattgtcagcttttacggtgggaatgatgaagcctaccttaattttggtggagcagtccttcttcattgggaaatgctacaatatgctaagtgtgagggaaaagagcggtttaatttttatgggacaatcgaaactgaagcggcaagtgctggaaaagggaattttaacttcaagcgtcagtttggtgggcaattagagactcttgttggctcttttgataaaaccctaaatcctttctatgatatttttaagaaaacactaggtaaagactagttccttgtatagaaaaaagtcaattgaggttaaattcattacctcaattgactttttttagtttacaaatattttttagcgacttcaatatcgccagcatagttatcgcgtttaccatttacgatctggaaggcatcggcacctttaccggcaataaccacagcgtctttagagtctgtagtctcagacattgctgttttgattgcttcctctcgatcgacaatgatacgaacctcgcgactgatgtgactagcaatttcctgacagatagcaagaggatcctccttgttaggatcatcggctgttaggatgacatcaacatcagggtaggtattgaggacatgtccaaagtctttacgacggctttcacccttatttcctggagcccctagaattagactaatacgaccatcttgatggctggttacgacttgtaagagcttatctaggctatctccattgtgagcatagtcaacaaatgtcttagccccattagtttgggttagaacctccatacgccctggaacagaggtttgagcgattccttccttgatgtcttgaaggctagctccgagacgtaggcaggccagaccagcagccatagcattgtcctggttaaagtcaccgataagttggatatcatagtcaccggctaatttcccacttgccttaaagctaaaaccagagccatgtttaacagcgttgtcggagtttttaccatagaagtcatgctctttatccacaacttcctcagcgataaaatcaaagtgatccataccgctattaacaataacaactcgactgttttccaagagaagacgcttatggtagaagtagtcttcaaaggttggatgttcaataggtccaatatggtctgggctgatgttaagaaagacacctacatcaaaagtcaatccatagacacgctttgtcagataggcttgacttgagacttccataatcagatgggtcataccattagcaacagcttcagccatcatacggaaaaggtccaaactctcaggtgttgttaaggtagacttgaagaagttttttccgtctagtgtcgtgttcatggttgaaagcatagcaggtttatgactttgcttgagaatattgaaggcaaagtaggctgctgttgttttcccttttgtcccagtgaaagccagcaatttaagcttgtcttgagggtattggtagaaggcctgagcaacgaggctcatagcctgcttaatatctgatacgataatggcaggtattcccacttgataatctttctcagccacgtagaaactcaagccagctttgacagcattctctaaaaattcaggcttgaaagcagctcctttggcaaagaagagggacgatggtgtgacatcacgactatcataagaaagatgatcaaaagtcaccccagtccatgaatagtagtagttgtcttggtcgataatatctctaaaattatggtcctttttaagaacctctagaacttgttcaatagtaatcatagttcctattttagccttaatgttcttgttttacaagtcacagccaaaagtttataataaactagattatattttattctctagaaagaaagttatgactgaaactaaaactgatacacagcagcagcagatgctaagagggacggcatggatgacagcatccaatattatcagtcgtctattgggggcactctacattattccttggtatgcttggatgggtaaacaaggtgaccaagccaatgccctttttggtcaagggtataatatttatgctcttttcctcttgatttcaacagcaggtattccagtcgcaattgccaaacaggtgtctaaatacaacacacttggaaagatggagacgagtttcttcttactcaagcgtatcttgtattacatgattggtctcggacttatctttggcgttttcatgtactttgcttcgccgtggatgtcttacctttctgggggagacgaggatctggttcgcgtcatgcgtagtctttcttgggcagttgttattttcccatcgatgtctgttttacgaggctttttccaaggctttaacaacatgaaaccttatgccttgagtcagattgcggaacagattatccgtgttatttggatgctgttggcgaccttcttcatcatgaaaattgggacaggcgattatgtgacagcagttgtccaatcgacttttgccgcttttatcggtatgttggctagttatggggtgcttttcttctacctttggaaggagggtaaactcaagagtctttttggcaagcaggctgttcatccggatatcaatccaactgcaattgttattgaaacctttaaggaagccattcctttcattattactgggtcagcagttcaacttttccagttgattgaccaatggacctttatccgtactatggagaagtttacaagctatagcaacagtcagcttcaggttctctatgcttacttgtcttcaaacccaagtaagattactatgattttgattgctgtagctatctccattgctggggttgggattccactcttgactgaaaatatggttaagaaggatcttaggggagcagctaaactgattattaataacttacagttgcttttgctctttattgttcctgccattgtaggatcagtgattttagctaaaccactttatacagtcttttatggtgcgccagatagtcaggcccacttgctctttgtagccagtctgattcaagttattttcttggccttgtatagcgttttagcaccaatgcttcaggcaatctttgaaacccgcaaagctatcaactattttgcgattggggttttagttaaggctattctacagctgccattgattattttcttaggagcccttggcccggttatttcaacagccatcggtttaggtgttccaattgctctcatgtataatcacctccacactgttacgcactttagtcgtaagacagtgtttagaaaagccttgctcatctgtatccttacggtactcatggctattccagttgcgatcttctattggttgttccagtttgtattgtcaccaacaagccgtatgggtagtgtgatttacttggtcattggaggaggccttggaatcggtgtctacggcgttcttgctcttgtaactcgtatggctgaccaactacttggtgcccgagctgctagtctgcgtgctaaattacatattaaataaaatctaaaccaagtcatgtggcttggtttttttcttttcaaccttttctgaaaaaggagtataataggggtgaaaaaatgaaatcgttttaatgatttagaatcgaggaaaggattatggttgattctagacaagaacatataaaattagggacctatcctcccgaacaagtttaccaagtcttgcagacaagccctcagggtttgagctcacaagaggttaaggagaggcaggcgacgtatggccctaaccaattgaaggaaagtaagaaggagcctatttggctgacctttttcagacattttactagtcttatggcactcttattgtggggtggtggctttatcgccatgctttctcatagtttagagttggggattgcaatttggttggtcaacattattaatggtctctttagctttattcaagaatatagggcgagtcaggctacggcagctcttaataagcttcttccatcctatgcgcgagttcttcgtgatggtaaggaggataagattctagctcaggacttggtgccaggtgacttggttttcattgaagaaggagaccgtatttctgcagatggacgcttggtcgctgtgacagatttgcaggttaaccagtctgccctcactggtgagtctaatcctatttataagtcagatcaagcagatttgactcccgacaagactgagttagagtatgacaatatggtatttgcagggactactgtctcttctggttctggacattttatagtatctgctatcgggatgaaaactgagtttggacagattgcggatttgacacagaatcttgctcaggaaaagagtccccttcagaaagaattagaccatttgactaaacagatttcagttattgcggtgtctgtaggtctcttctttatggtggcagcgactctatttgtccatcagcctttgtctcaagcctttatttttgcattggggatgattgtggcctttattcctgaaggacttcttcccacagttactctatctttagccatggccgttcagcgcatggctaaggaccatgctttggttaagaaactgtcttcggttgagacgttgggagcaacttctgttatttgttcggataaaacagggactttgacgcaaaatgccatgacggttaaccatctgtggactttgtcagacagttatgaggtaactgggctaggttatgcatcagaaggacagattgagcaggaaggacgacctatttctcttgaagacaatgagcttcttaatcgtttggtacgattctctcatttggctagtaatgctcaagttgtggcccctagtgctgataatcccaattttacaattttaggtgatccaactgaggcttgtcttaatgttctcgccgaaaaagcaggaattaatttaaatgacaatcatacttgggcccctcgcctcaaggaaatcccctttgattctgatcgtaaacggatgacgacagtgcataagcttgaagtaggagtggatggcagtcagcatatttctatcaccaaaggtgctccgaaagaagtgatggagctttgctcagactattatgataatcaaggaatgattaaatcattgacagctactgagcgtcaggctatccttgcggccaacgaccagtttgcccgagacggtttacgtgttttagctgtggcctatagacctttagacagtgagtatattggagaagacaaatgggacatgcagaccttggaggacaatatggtctttctaggcttggttgccatgagtgatccgccacgtcagggtgtgcgtgaagccattgaaaaatgccatagagctagtattcgtattatcatggtgacaggtgattatggtttgacagctcttagcattgctaagaaaatcggaattgtacaaggagacgatgcgcgtgttgtttcaggccttgaactagctggtatggatgacaatcagcttaaagaagctcttaaaggcgaaatcgtttttgctcgtgtggctcctgaacaaaaataccgtgtggtcaatgcccttcaagagcttggtgaagttgtcgctgttactggtgatggtgttaatgacgcccctgcccttaaaaaagctgatatcggtgtagctatgggggtatcaggaactgatgttgccaaggaatctgcagatatgatcttaacagatgatcattttgcttctattgttcatgctgtcgaagaaggtcgtgcagtttatagaaatattcaaaaattcctgacttatatttttaattccaacacgccagaagccgtaccctctgctttcttcttgttctctttgggacgcatacctcttcccttaacggttatgcaaatcctagctattgacttggggacagatatggtacctgctttgggattgggggttgaaccacctgaagagggcgttatggatagaccgccaagacgtctttcagatcgcttgctcaatcgacaattattgattaaagcttttgtctggtatggactgattgaagcagccttagctatgggggctttcttccttaattattgggttaatcaaggtaatttaaaccatttggccagctcaggtcctctttatcgagaggcaaccactatgaccttaggtgctattatctttacccaaattggtatggctatgaatagtcgtaaaggtagagggtctatattccaagttaatccatttgctaatcgtattattagcttagggattgttttagaaattgtcctctttatcctcctgtcttacgtgcctttcttccacacgttatttaacactgcacctattggacttgatgattggctctatttacttgcttgtccgtttgttattatggctttggaagaaatcagatatcgcttatttgataaaaagtaagtcagtggcataccttagattgaagcaagacttttaaatcatttcttagcgcctgaaacgataatgtttcaggcactttttgatgcttgaaaacctactttcgaaaatctcaaaaattgggcttattttaaattagagtcagtatctatctgtctttttaggttatagaaataaactataactaactatcaagaatccgtatgatgaacttaccattattttcagaaaatagtgataaaatagaggtcatagatatggagcatatccactttaccatgtagaaagggcacattatgacacaagaatatcaattagaaaccgttttggcacacgcaggaatcaattcggatgaagcaacaggagccttggcttcaccaattcatttttcaacaacttaccaacatccagaatttggccattctactggttttgactatacacgaactaaaaatccaacacgcgcaacagtggaaaaaacacttgcagctattgaaaaagcagattatgctattgcgacaagttcagggatgagcgccattgttttggcctttgaaattttcccagtaggcagtaaggttgtagctgcacgtgacctttacggaggttctttccgttggtttaatgacaaggaaaaagaagggcgtttcttttttgaatacactaatacagaagacgagatgattgcggctattacagaagataccgatattgtctacatcgaaacaccgacaaacccacttatgattgagtttgatattgaaaaagtggccaaaattgctcatgacaagggtgcggtggtgattgttgataatactttctatagcccaatctatcaaaccccgattactcaaggtgctgacatcgttgtacattcagctactaaatatctatcagggcataatgatgttttggctggtgttgttgtgaccagcaaccaagaattctacgataaactttattataacctcaatactactggtcctaccttgtcaccatttgatagctatatgctcatgcgtggtcttaaaaccttaaaacttcgaatggaggcatcgacagccaatgctcaagaagttgtagctttcttagaaaagtcaccagctgttaaggaagtcctctatccaggcaagggtggtatgatttccttcaaagtggctaatcaagacaagattcctaccattatcaattctctaaaggtctttacctttgcggagagtctaggtggtgtcgaaagcttgattacctacccaacgacacaaacccacgcagatattccaggtgatgtgcgtgcttcctatggtttgacagacgacttgcttcgtctttcaattggtattgaagcagcacaagatttgattgctgacttggaaaatgcccttagtctttaaggagttatctatgacacgttatgattttacaacacaaccaaatcgcttggatcaaaataccatgaaatggcacgaagccgaaagtaatccagaactacttgagctttgggttgctgatatggacttcctacctgttcctgagattagggatgcagttatcaactatgctgagacacatatttttggttatccttatccaagtgaagagctttatcagtccatcattaattgggaaaaaaatcaacacggttacgtcgttgataaagagagtattgttctcattgaaggtgttgttccagccatttcaacagctattcaagcctttaccaaagaaggtgatgctgttctcatcaacacaccagtttatccgccttttgctcgttcggtccgtttgaataatcgtcagttgattgaaaatagtcttgttaaggttaatggccatttcgaaattgattttgaacagttggaacgtgatatcgtcgagaatgatgttaaactttatgttttctgtagtccacataacccaggtgggcgtgtctggactaaagaagaattgactaaggtagcagatttgtgccagaaacatggtgtcctcttggtatctgatgaaatccaccaagacttagccctatatgggaataagcacatctctatgaatactatttcagatgcttacaaggactttaccttggtgcttagttcggctactaaaacctttaatattgctgggaccaaaaacagttttactatcattgaaaatgaagacttacgtaaagcctttaaacaaaagcaattggcaaataatcaacatgaaattccaaccattggattgattaccacccaagcagctctgacctatgggcaaccttggttagaggaattgaagactgtctttgaaactaatattgaccttttaaccaaggaacttagtgaaaagactaatatcaaggtcatgaaacctgagggaacttacttggtttggcttgatttttcagcttatgatcaagaccataatgaacttggacgtttacttaaagaagaagccaaggtagtgctaaatgacggtattacttttggttccgaaggagaaaaacatttccgctttaacgtagctacgccaactacagttgttactgaaggagttaaacgtctcgtttctgtctttggaaaataataaaagtgatgcgaacagcatcacttttattattgttatgagtgtacatcgtagattttcaagtttaatagaagatctttctgagtggagaagaccttgacatcctgcctgccagaggtattaaatctggctagagtgtaggtttggccattggggaagaaaatttccaagctacgattatctgtaataagcgttatagtgatattatcagtttccttatagtgactgtcagctttataaccttgaccgttacccaagagaccatcgtaatagtaagaagaggcagtttgactaccatccatgctgttattcagttcagcagcataggcagagacctgataggtaccacttgttatttggtaggcgattttaacgtaatcagagccttgccagatatcaatgtagatatagcctccttctttcttaatatttgaaaaatgcagttggtaataccccgcactatttttttcagcaaggtcaagaaggccattagcattctgattgtgacttttatcaatccaaggttttctattgtcactggtgagtggcctttgactcgaaatgttgccgttttgatttttgagggttaattgttcatttttatagaggggagcggactgaataataccgtccttatccagttgtagctgtctgggtgtagcgtaaaaaccgatagtttttagaaaatcactcttggcctcttggtcactgtgaatgcctgacgtgaagtagttccaattaccaacccagccaagactgataaggttatggttgctttcttcgattcgattgcttccagtgaagttagcgccataatagtcagagccttgatctaagcgttttgtttctgtatctgcaataaataagccgttaccatctaaatgccctacagtatagtaggttccagttgtttcgcctgaagctgtatccttagctccaaaaaagagaatttgcttgtcctgaccgtcagttgttgtcattgtttttagaacgggacactcgataggagcgttgtcctgccagttacgacccttaaaaaatgtttcgggtaggattttggagtctcccttgctatctgctttggtccagttgataccatcttgagattgataaacacctaaggcgtcaccttcagcgacatacatgagtaatttgtctttgaagtggaagacataaggatcgcggaaatctttaccgttataggattgttcctttgtcaataaaggtttaccatcttttagggttttagtaaagctagctcccttgtcatttgatgcactagcatagattgcctggcttccatcatccatgagtccagtaaaataggcgacaggttcttcgttttggataccagaaatcccctgactatctgtgactacactacctgtccaagcagaatgccacccctctttagggtcaccaccctttgctggtatagcagtctcttgtttactataggtgataaaatctttagtcgttgtatgtgtccaatcttgaccgttgggtccaaaagggtcagtagccccatccacagagtgtagaaaatagatatcatagtaatttttttcttgattccacacgatagtctgtaggtcgttagaccatcctttatgagatgctagatgaaaggtttgactcacagaaaccttatttgttttttgggaaggattgttagcgttctcattttttattataaaaacaaaaaataaaattaaaaaaacgagagctaaaattagaggtgaatgttttgattccatatagtgatatttcctgataaaattacttattttgtagttattattttaacaaaaaaatagttttttacaaaaaatataaatttgtcattaaaaaaagattggaatttagattaaaaaatgatagaataaaacatgtgaaaacctaaaaggagagtttaatatggatagtacagttaattcacagtcaaatacagtagcaccaaagcaagcagagtgcaaaaagatgcgttatagcatccgtaaggttgccacagtaggggcaacatcagcgctcgttggtaccttggcatttttgggtgccactcaggtaaaagctgatcaagttacagaaacagcaccagcggtagctactgcgacagcaacaccagaaacaagcacagcatctctaacggtagccagtgaaacagcaacaagtgtggcaacttcagaagcagttgaatcttcagttgcacattcagaggttgcaactacaccagttacagagacacaaccaagcaacacaactccatcagtagtcgaagaaaaggtgtctagcacagtagtgacatcttcatcagatgcaacaacaccttcagcaactgttgctgcggtttctgctccagctcatacatcagaggctgcagtagaggcaccaacttcaacagcaagctcagaaacagctgatacacacactgaagtagcccttaaacctactgaaaacagcgctgctaatgcaaaccttagcaaacttaacggtcgtatcaagtctattgttgaagataatatgacctcagatcaaatcgttgccttgactgaggaagaaattaaagcacttaataaagttgactttagcgatgatgctatcaagggtacaggtactagcttgacttaccgtaacttgaaagatatcgttgctagcttcttgaagcaagacagcaaattggcagttccttactttaaagcagatacaatcatcaatatgcctgctttcaacactgttgatgcccaaacgatgaaaaaagaagaaatcgacgtttgggattcttggccagtccaagatgctgagtcaggtgtagtaagcaactggaacggttatcagttggttatctcaatggccggtgcaccaaataaaaactcaaaccacatttacttgctctatagtaaatacggagataatgactttacacattggaaaaatgcgggtccaatctttggttataatgcccttgaagatgaccaacaatggtcaggttcagcgacggtaaactctgacggtagtatccaactttactacactaagaatgatactagcggcggtaaattgaactggcaacaattggctagtgctacacttaacctagctgttgaaaacgacgaagttgttattaagtcagttgaaaatgaccacattctctttggtggggataactatcattatcaaagttatccaaaattcatgagtactttcaacgatgaccacaaccacgatggaaatccagaccgtacagataactactgtcttcgtgacccacacatcattgaagataacggtagccgttaccttatttttgaatcaaatacaggtgacgaaaactaccaaggcgaaaaacaaatttacaaatggtcaaactatggaggagatgacgcctttaaccttaagtcattcctcaatattgttaataataaacacctttacaaccttgcatcatgggcaaatggttctatcggtatcttgaaacttgatgataatgagaaaaatccatctgtagctgaactttacacaccgcttgtcactagccacatggttactgatgaagtagaacgtccaagtgttgttaagatgggtggcaagtattacctcttcactgcttcacgtatcaacaaatctacggatgctgaaggtactgtagcagcgcgtgaagctgtcggtgatgacgttgtcatgcttggattcgtatcagacagcctccgtgggaaataccgtccacttaacggctcaggtgtggtcttgacagcctctgttccagctgactggcgtacatctacctattcttactatgcggttcctgttgaaggatcatcagatactctcttggttacttcttacatgactaaccgcggtggtattgctggtgctgagaataaatcaacatgggctccaagcttcctcatcaagatgaatgcagatgatactacagaagttcttcctaagatgaccaaccaaggggactggatttgggataaatctagtgaaagcttggtacacgtggccgatcaaaacagtgctaaattgccaaatgaggactataacgtagattattatgcagtgtcagattatggtcttaaaccacatacttatcctacagttgatggttcaccgggcgtttctgaagctcgcggtgtcttaactgtaactgttaaagatggtgaagacaagaaatcagataaatcagaaacaccagtaaatccaacagaaggtaatcattctgttgatgataagtctaacaaaccagatacaccttctaaaccagcagacaataatcaaccatcaactaataaagaagataaaccagcaacgccgacgaatccagattctccagttcgtaatccgttcccttatttcacagaccgcccatctaatgataataattcatcagatgatcatcatgtagaggttcctgcgaaaccttcaacagagagttctgtgggtgaccgtcgtccagtagctcaagctacagagattgcgtcaccagtaccagaggctattgtagcaactggaccaactgtttcaacgactcctgttaaagaagagtctgtcactgaaacagaagctccaaaaccagctaagtctgaagaggaagttcagtctcacggagtcgctaaagctgatgaagtaactaagtctgatgagtcaagtaaagacaacaatactaaagttgctgccaaacttgctacgactcctaagacaccaagtgattcagaaggttcaaagagcaacattctttcaatcttggcgactatctttgcagcaattgcaagtctagctcttcttggctatggtttggtcacaggaaagattcatttgcctaaaaaataatccttttcaaaaacgtttgcagtaaagcaagcgttttttttgcctttttgatataatggagtgaatataaagcaaaggaagaaactattatgggtaaatttcaagttatttcacatccactgattcaacataaactttcaatcctccgtcgtgaggatacttctactaaggacttccgtgagctagttaatgaaattgctatgctcatgggttacgaagtgtctcgtgaccttcctctcgaagaggttgaaattcaaacaccaattactaaaactgtacaaaaacaactttctggtaagaaattggcgattgttccaattcttcgtgcgggtattggtatggtcgatggtttccttagccttgtaccagcagctaaagttggtcatattggtatgtatcgtgacgaggaaactcttgagccagttgagtacttagttaaattaccagaagacattgatcaacgtcagatctttgtagtagatccaatgcttgcgactggtggttcagcaatcttggcagtagactcacttaaaaaacgtggtgcagctaatatcaagtttgtttgcttggttgcagcaccagaaggtgtcaaaaaattgcaagatgctcacccagatattgatatctacacagcatcattggatgagaaacttaatgaaaacggttatattgttccaggtcttggagatgcaggtgaccgtctctttggtacaaaataagttgaaaagggaaaatttccctttttttactagattaataagttttaagtgaaattgttatagaagagtttagcactcttttagaaagagtgctaagaatgatgttttttatttgacctaatttgactaaaatcatataatagcatcaagacaatattaaaaggaggattcatatgattcctgtagtaattgaacaaacatcacgcggtgagcgttcttatgatatttactcgcgtttgctcaaggatcgtatcatcatgttaacaggtcctgttgaagataatatggcaaactcaattatcgcccaactcttgttcttggatgctcaagacaatacaaaagatatctatctttatgttaatacaccaggtggatccgtttcggcaggtcttgccattgttgatacaatgaacttcatcaagtctgatgttcagactatcgttatggggatggcagcatctatgggaacaattatcgcttcaagcggtaccaaaggtaaacgtttcatgttgccaaatgcagagtacatgattcaccaaccaatgggtggtactggtggcggtacgcaacaaacagacatggctatcgcagctgaacacttgctcaagacacgtaataacttggagcaaatcttagcagataattctggacaaccaattgaaaaggttcatgtagacgctgaacgtgacaattggatgagtgctcaagaaacgcttgaatatggtttcatcgatgaaatcatggctaataaccaattaaaataaactgagcttgtcttaaacaaaagtcagatgcaaatcggttgtataaggaccgtttcatctggctttttgtgttataatagaaaacatgttaataatcaatgaggagttgcttgcgattgatcaagctatagagtgtcttgtttcgtgttttataaagctacctgagatagagaattaccgtttaaaacgccagaaattcgaaaatgacagagaacttcaagagcaactctttgcatttcaagaattaaaagatagctatgatgctgctaaggcgtatgaggcttttagaccagatgtgagagagttgaaacgtcaggttttgcgaatgaagcgccaaattgatttaaacgaggtggttattggctatcgtcgggcagagttcgatttacagaccattttagccaatcttggtgaggagattgcccaagctgtttcagaccagatttttattgatactgggctacctcttgcccctcataaaccacatcataaaaagggagacactaacataaaggagaagatgagtcatgattaagcgtcaaggcattattgtttatttatactacaatagagacttacgtaaaattgccaagtttggggatgttgtctaccattcttataagatgcgttatgtgcacctttatgtagatgaggacaaggtcgaggatattttgaaagagctcgatggaatgaaagcagtgaaaaaagttctgccttcttactattctgatattgatatggactttgtaggtagtctggaacgttacgacacctcagtccctgaaccgtttaagaacttttctctttaataagagaaaagtttttttctttttaaagagttattcttaaagtaatggaaacgattactgccgctaaagcttagttatgtgtagttgacaattgtctgataattctgtaagctataaggtggacttttttaagaaaatattaaggagaaatcttatgtctaaaaagatcacacttattgtgttagccttttttgcttccattttcttggttgcctgtggcaagtcaccagatgtgactgctaatgccaatggtactaagattggcgataccatcaaaattggtgttaacatggagttgacaggtgccgttgcagcctatggtaaggcggagcagaatggtattaagttggctgttgacgaaattaacaaagctggtggcgtcgatggcaaaaagcttgagcttgtcacaaaagataataaatctgaaaatgctgaagcttcaacatcttcaacgaacttggctattcagagtaatgtaaatgctatcgttggtccagcgacatcaggtgctgttgctgcggctagcctcgtatcacaaaaaacaggggttcctttgctgacaccttcaggtacgcaggatgaccttacggtagatgctaatggtacgaagaaattcgttttccgtacaaccttcaaggatagttaccaaggtaaagttttggcagcttattcttacaataatttgaatgctaagaaagtagttctctactatgataatgcttcagattatgccaaaggtattgcggatgaattcaagcgtgaatataaaggtcaaatcgttactgaagctacctttgcttcaggggacaaggactatcagtcagccttgacaaaatttaaagaccttgattatgatgctattgtaatgccaggttactatactgagactggtattatcactaaacaagcacgtgaccttggaattgataaaccaatccttggacctgacggatttagtgatgcgaaatttactgagcttgcaggtaaaaagaatgcgtcaaacgtctactatgtatcaggatattcaacaaatgttgctctttctgacaaggcatcaggtttcattaaagcatataagaaagcttataacactgacccaaatatgtttgctgctctagcttacgattctgtttatatgattgcagaagcatcaaaaggtgcgaaaacatcagttgatattgccgataacttagcacatttgaaaaactttgtcggggttacaggtaaaatgacgattgataaggatcataaccctattaaagcagctcttatggttaaaagagataatggtgaagaagtttcagcggaagccgttgaaattgaaaaataatctgttatctatactaaaaatgaactagaaagtttggttatatatgttttttgaacaacttccccaacaactagtcaatggtatcatcttgggtagtatctatgccctacttgcccttggatataccatggtttatgggattatcaaattgattaactttgctcatggagacatctatatgatgggtgccttcgttggttactatgcgattaatagcctcggaatgaatttctgggttgcccttgtctttgctatgcttgtctgtgcgattttaggggttgtcattgagttcttggcttatcgcccactccgtaattcgacacgtatttctgccttgattacggctattggtgtctcattcttccttgagtacatcatggttctctttgtaggtgcagatacacgttcattccctcaaaagattgcaattaagacttatcatcttggatcaatctctgtaacaaatgtgcaattgcttatcttggtagttgcccttgtccttatggttgctcttcaattgattgttaaaaagactaagatgggtaaagctatgcgtgccgtatctgtagacagtgatgcagctgaattgatgggtattaatgttaataatactatcagcttcacttttgctcttggatcatcactagcaggggcagcgggtgtccttattggtctttactataactctatcgaacctcttatgggtatgacaccaggtattaaagcctttgttgctgccgttcttggtggtatcggtattatccctggtgcagcacttggtggatttgttatcggtattttggagacattatcaactgcaattggtttgtcaagttaccgtgatgccatcgtttatggtgtcttgatcgttatccttttggttcgcccagcgggtatcctcggtaaaaatgtgaaagagaaggtgtaagacatgaagaaaaatctaaaagtaaaccttatttggtttggtcttatcattgggctcttccttatcttgaaaggtcttgaactttcaggtatcatgaacctttactacatccaaatcttaatggggattggaatctcaatccttatgggacttggtactaacttggttcttggtttctcagggcaatttacacttggtcaagctggtttcatggcaattggtgcctattcatcagctatcatcactggtatgatgccaacatatgacggtttctacctctcaatggttgtcggtgtcatcatcgcagctattgttgcccttatctttggtctacctacccttcgtttgaaaggtgactaccttgccattgcaactcttggtatggctgaaatcatccgtatcattatcgttaatggtggtgaattgaccaatggtgccgctggtttgacaggtatccttccctatactagttggcctgtaatttatttctttgtggtaatcattaccattttggtgcttaatttcttacgttcagcaactggacgtcaagcaatcactcttcgtgaagatgaaattgctgctgagtcaatgggtgttaatgtcacaaaaatgaaggttcttatctttgttattggtgccatgatttcagcgattgctggttcactttatgtcagctacatcggtacagtcgtgccgaaagacttcaccatcatgaaatcaattgattaccttatcattgccgttcttggtggtcttggatcaatcacaggtactatcattgccgctgttgttcttggtattatcaacatgttcctacaaaatgtttcaaaccttcgtatgattatttacgccttggctttgattcttgtaatgctcttccgtccaggtggacttcttggaacaaaagaactctatctctcaaaattcttcaataaatctaaggagggcaaataaaatggcacttcttgaagttaaaaatctgactaaaaacttcggtggtttgactgccgttggtgatgtttcaatggaactcaatgaaggtgagttggttgggcttatcggaccaaatggcgctggtaaaacaaccttgtttaaccttttgacaggtgtctatgagccaagtgaagggactgttatacttgatggtacagtcctaaacggtaaagcaccttataaaatcgcttcactcggtttgtcacgtactttccaaaatatccgtcttttcaaagacatgactgtacttgaaaacgttcttgttggtttatcaaataagcaaccttcaaatttctttgcatctcttttgcgtttgcctaagtactattcaagtgaagaagagttaaaagcaaaagctatgaaactcttggctatcttcaacttggatggtgaggcagatacacttgcgaaaaacttggcttacggacaacaacgtcatttggagattgttcgtgcacttgcaacagaaccaaaaattcttttccttgatgaaccagctgcgggtatgaacccacaagaaacagctgaattgactgctcatattcgtcaaattcaaaaagacttcggaattaccatcatcttgattgagcacgatatgagtttggtcatggatgttactgagcgtatctatgttttggaatatggacgcttgattgccgaaggaacacctgatgaaattaagaataacaaacgcgttattgaagcttacttgggaggtgaagcataatggcaatgttgaaagttgaaaatctctcaattaaatatggatcgatcgaagctgtaaaaaacgtcagctttgaagttaatgaaggtgaagtcgtaactcttatcggagctaacggtgcaggtaagacatcaattcttcgtaccatctcaggtcttgttcgtccaactgagggaaccatttcttatcttggaaacgacatccacaaaacaccagcacgtaagattgttgccgaaggtttggctcaagtacctgagggacgtcatgtatttgcaggattaaccgtaatggaaaatcttgaaatgggagctttccttcatacaaataaagaagagaacgcagctctcttgaaaaaagtcttccaacgtttcccacgtctagaagaacgtaagaatcaagatgcagcgacactttctggtggtgagcaacaaatgcttgcaatgggtcgtgcccttatgagtcgtccaaaacttttgcttttggatgaaccttcaatgggacttgctccaatctttattcaagaaatttttgatattatcgaagatattaaggcgcaaggaactacagttcttttgattgaacaaaatgccaataaggctttgtcaattgctgatcgcggttatgttcttgaaactggtaaagtagttctttcaggtactggtgaagaacttcttgcatcagatgaagttcgtaaagcctatcttggaggataagaaaaagcgcccgagggcgtttttctatcgtcttatgctgattgtaaaatactaatttttcagtaaaatattgcaatcggtttcaattagtgtggtataatacaagtaagaaatcattcggaggaaaatgaaacatggcagtaaaagattttatgacgaaacgtgtagtttatgtctcaccagaaacaacagttgcagcagctgcagatattatgcgtgataaagggttgcgccgtttgccagtaattgaacacgataaacttgttgggcttgttacagaaggtacaatggcggaggcctcaccatcaaaagcaacaagcttgtcaatttatgaaatgaattatctccttaataagacaaaagtaggagatatcatgatcaagaatgtccttactgtttccaaatatgctagccttgaggatgcaatctatatcatgcttcaaaataaggttggagtccttccagttgtggacaatgaccaaatttcaggaattatcacagataaagatgtctttcgtgctttcttggaaatttctggttatggtcaagctggaattcgtattgggttggaagttacagatactccacgtgttttggaaaaaattgcgaaccttattgctagtgagaatctcaacatcgaacgtacaattgttgcccctaaaaatgacactgtacttcgtgttgaacttcaagttgaaggagagattgggattgaacaactcaagaaggtttttgtagaagcaggatttacagttactgaaattgcagaaacagaagcaaaagagttagactaataacaaggataaaaaaacagaaagtttgtaggaacagttcagtggaaatgagattaaaatccttactttttctagtaattgatgaactacaggcttaactttatacaataaaaagaggctagagcattatgctccagcttcttttttattagtcttgaaaatcgtaaagtgttgtagagaggtagcgctcaccattgtcaggcaagagtgtcaagacttttttgccttcgccaagctcagcggcaacctttagggcagcagcaatagcagcacctgatgagataccagctaggaaaccttcttggctacccaatgtacgtgatgttgcgatagcttcatcagaaggaatacgcacaacactgtcatatgattttgtatccaatgtgtcaggaatgaaaccagttgagataccttggattttgtgtggtcctggtttatcaccattcaagacagcagattcgtcagcttcgataccataaaccttgatatttggattggcagccttaagggtttttgaaacacctgaaatagtaccaccagtaccgataccagcaacaaaagcatccaaaccttctgcaccaaaatcttcaagaatttcttggccagttgtagccgcatgaacagctgggtttgatgggttagcaaattgaagaggtacccaaccattgcgttcagcagcaacttctttagccttagcaattgcacccttcattccttcgctaccaggagtcaaaacaagctcagctccataagcttggatgattttacgacgttcaacactcattgtatcaggcattacgataacaactttatagcctttagcagcaccgacccaagcaagaccgataccagtgttacctgaagttggttcaacaatggtatcaccaggtttaatcgtaccagccttttcagcatcttcaatcatacgaagagcaatacggtcttttactgaagaaccagggttgaatgcttcgagtttaacgtaaacatctgctgatccttctggaacaatagagttaagtttaataacaggtgtttttccaacaagttcggtaattgagttgtaaattgtcatatttaaaatcctcttaatctttgattgatggttctaagtatacgacggtagggccaacttgtaaaatacatcttctttatcactgtgataacgtttgactatcagataggaatttcaacgattttctttccagatttttcataagtaactttcccttgatagaattcggttagttcctgaccgagtctttcaatctcagactcttcgacaaataaagtagtagaaacatctgataagaaagttgtatcaaattcttggagtccttctttttcaaggaagttggaaaagacttggtattgagagtaggttaactctacggttagtcctgttaattccttgacttcaactcggccaatctcttcaatagcatgagcaacgctaccagagtaagctcggataagaccacctgccccaagcttgattcctccaaaataacgagtcacaactgctacgacattagtaagaccttgtttttctagaacagtaagcataggaaccccagctgttccagaaggttcaccatcatcactggaacgcttaatttggccatcatcaccaacgattattgcagagcaagaatgattggccttgtgatgctgtttcttaatctgagcgatatattctcttccttcttcctcacggctgatacgtttcaagtgacaaataaaacgagatttttttatttcttcttcaacgattccatcgttggcaatagttttgtaatccataaaaaaattttatcataaaaagatgaattcaaacatattttcgaatagaaagatatggtacctaaagaatattatggacgactatttacgaaagagcagttgccagtgaactatcacccagaggctttaacattagaaggtatgataaaggtcgataaacaacttagatgtaaaagatgttacagttggatagaggaagattggcaattaccgggaggtcagtattattgtagagcatgtattgtctttggtagaaaccaagaaggaaaagaactttattattttccttccaaaacatcagaaattgaatttcctgttttgaagtggtttggagaactgactccctatcaagctaaggtctcagagaaacttttgagaacttatcaaaaacagaaagatagtctcgtacatgctgtgaccggtgctggtaagacagaaatgatttataacatcgttgcctatgttctggaaaataaaggtcatgtagctatcgcaagtcctcgggttgatgtttgtcgagaactatttctacgtatgaaaagggattttacttgtagtatttccctgcttcatgctgagagtgaaccatatgatggtagtccgcttgtaatagctaccacacatcaactactaaagttttaccagagttttgacttagttattgtagatgaagtagacgcatatccctttgtaggaaatgtcatgttaaatcatgctgtagaacaggcgaagaccgaaaccggtcgatttatttacttaacagcgacttcaacattatctttagaagagcaagttcgacttgggactttagaaaagcatcaccttgctagacgtttccatggaaatcctttagtacttcctaaattcttctggcagggcagattacaaaaatctctgacaagaggcaagcttccaagacctcttctttatcagattaaaaagcaacgtaaatcaaaatttcctctattaatcttctttccaaatatagcgataggtgaaaagtttacaagtattctacaaaaatatcttccagatgaaaaaatggcctttgtttcctcaaaaagcgagaagcgttcaactatcgtagagaagttccgaaaaaaagaactgtctatcttagtgacaacaactatcctcgaacgtggtgtaacctttccacaagtagatgtttttgtttgtatggcaaatcatcacttatatactagttcgagtcttattcagattggaggaagagttggaagatcaccagatagaccgacaggaaagctttatttctttcatgaaggactatccaaatcaatgcttcggtgtcgagaagagataaaggttatgaataaaaaaggagggtttaacaatgaagtgtctgctatgtaatgattggattgaatcactaccaaaattaagagaactcattatgtttaaccaaagaaaagagtactcttgccgatcatgtaaacatcagtttaaaaacctctcaaaagaaagatgtcaaaattgtaataaagagttatatggagatgcttgtattgattgtaaactttggatgaaaaaaggctatattcctaagcaccttgctatttatcgatatgaggaaaatatgaaagagtattttagtcgctataaatttatgggagactattgtcttagaaaaatatttcaacaagatattaaaaacaacttaaaaccatttttgaagaaaggttataccatagtgccagtcccattatcggaagaacgcttggcagaaagaggattcaaccaagttgagggattgatagagggaattccctatcgggatatctttgagaaaagagatattgagaagcaatcctcaaaaacacgcgaggagcgtctaagtcaagataatgccttctgtctcaaggaaggtataaatctaccagataagattattatagtggatgatatctatacaacgggttccactttatatcagatggttcaactgttagaaggtataggtattaaagaagttttgaccttttcactagctagataataaaaatccttgcaaattttcatgaaaaggatataataaagataaagaaaacgctaacaagcgagaaagaggtcttttatgattaaatatagtatccgtggcgaaaacatcgaagtaactgaagcacttcgtgactatgttgaaagtaaacttagcaaagttgaaaaatacttcaacgaagaccaagaattgaatgcacgtgtaaatcttaaggtttatcgcgaaaagacagctaaagtagaggttactattccaacaggttctgtaacactaagagcagaagatgtttcgcaagatatgtatggttctattgacctagtggttgataagattgaaagacaaatccgtaaaaacaaaacaaaaattgcacgtaagcatcgtgaaaaagttccaacaggagaagtattctcagctgattttaataacgaacaagttgaagaagcaccagctgttgaagttgtaagaactaaaaacattgagttgaaaccaatggatgttgaagaagccatccttcaaatggaattgttgggtcatgacttctttatctatactgatagcgaagatcatacaactaatgttctctataaacgagaagacggtaactacggtctgattgaagctaaataataaaaaaggaagtaggttgagaaacgtgcttcctttatttttttcaaaaatctattgacaagtattgatttggatgttaagatataaaagttgtcttaacagacttgccataaacttgaaaaggttccaaaactttaaaaaagttattgacaagacaggccagagatgatattataaataagctgtttcgcgagagatagcagacacgagaagtaaaaaaacttcaaaaaagtgttgacaaggtattctagatttgctagaatatagaagttgtcttaagagagacaaagacctttgagaactgaataagaaaccaagtgcagggttatgatagaagaattataacctgtcaatttacaagaataaatcgtcagacgacggtaatgagttaacgctcgaacaattattaaaatttttaatgagagtttgatcctggctcaggacgaacgctggcggcgtgcctaatacatgcaagtagaacgctgaagagaggagcttgctcttcttggatgagttgcgaacgggtgagtaacgcgtaggtaacctgccttgtagcgggggataactattggaaacgatagctaataccgcataacaatggatgacacatgtcatttatttgaaaggggcaattgctccactacaagatggacctgcgttgtattagctagtaggtgaggtaacggctcacctaggcgacgatacatagccgacctgagagggtgatcggccacactgggactgagacacggcccagactcctacgggaggcagcagtagggaatcttcggcaatgggggcaaccctgaccgagcaacgccgcgtgagtgaagaaggttttcggatcgtaaagctctgttgtaagtcaagaacgagtgtgagagtggaaagttcacactgtgacggtagcttaccagaaagggacggctaactacgtgccagcagccgcggtaatacgtaggtcccgagcgttgtccggatttattgggcgtaaagcgagcgcaggcggtttgataagtctgaagttaaaggctgtggctcaaccatagttcgctttggaaactgtcaaacttgagtgcagaaggggagagtggaattccatgtgtagcggtgaaatgcgtagatatatggaggaacaccggtggcgaaagcggctctctggtctgtaactgacgctgaggctcgaaagcgtggggagcgaacaggattagataccctggtagtccacgccgtaaacgatgagtgctaggtgttggatcctttccgggattcagtgccgcagctaacgcattaagcactccgcctggggagtacgaccgcaaggttgaaactcaaaggaattgacgggggcccgcacaagcggtggagcatgtggtttaattcgaagcaacgcgaagaaccttaccaggtcttgacatcccgatgctatttctagagatagaaagttacttcggtacatcggtgacaggtggtgcatggttgtcgtcagctcgtgtcgtgagatgttgggttaagtcccgcaacgagcgcaacccctattgttagttgccatcattcagttgggcactctagcgagactgccggtaataaaccggaggaaggtggggatgacgtcaaatcatcatgccccttatgacctgggctacacacgtgctacaatggttggtacaacgagttgcgagtcggtgacggcaagctaatctcttaaagccaatctcagttcggattgtaggctgcaactcgcctacatgaagtcggaatcgctagtaatcgcggatcagcacgccgcggtgaatacgttcccgggccttgtacacaccgcccgtcacaccacgagagtttgtaacacccgaagtcggtgaggtaaccttttggagccagccgcctaaggtgggatagatgattggggtgaagtcgtaacaaggtagccgtatcggaaggtgcggctggatcacctcctttctaaggaaaaacggaatgtacttgagtttcttatttagttttgagaggtcttgtggggccttagctcagctgggagagcgcctgctttgcacgcaggaggtcagcggttcgatcccgctaggctccattgaatcgaaagattcaagtattgtccattgaaaattgaatatctatatcaaattccatatgtaattaaatacatatagatagtaacaagaaaataaaccgaaacgctgtgaatatttaatgagttaggtcgaaagaccaaaataaggttaagttaataagggcgcacggtggatgccttggcactagaagccgatgaaggacgtgactaacgacgaaatgctttggggagctgtaagtgagcaatgatccagagatgtccgaatgggggaacccggcaggtaatgcctgtcactcattactgttaaggtaatgtagaggaagacgcagtgaactgaaacatctaagtagctgcaggaagagaaagcaaaagcgattgccttagtagcggcgagcgaaacggcaagagggcaaaccgaagagtttactcttcggggttgtaggactgcaacgtggacttaaagattatagaagaactacctgggaaggtaggccaaagagagtaatagcctcgtattcgaaatagtctttatacctagcagtatcctgagtacggcgagacacgagaaatctcgtcggaatctgggaggaccatctcccaaccctaaatactctctagtgaccgatagtgaaccagtaccgtgagggaaaggtgaaaagcaccccgggaggggagtgaaatagaacctgaaaccgtgtgcctacaacaagttcgagcccgttaatgggtgagagcgtgccttttgtagaatgaaccggcgagttacgatatgatgcgaggttaagttgaagagacggagccgtagggaaaccgagtcttaatagggcgcattagtatcatgtcgtagacccgaaaccatgtgacctacccatgagcaggttgaaggtgaggtaaaactcactggaggaccgaaccagggcacgttgaaaagtgcttggatgacttgtgggtagcggagaaattccaaacgaacttggagatagctggttctctccgaaatagctttagggctagcgtcgatgttaagtctcttggaggtagagcactgtttgggtgaggggtccatcccggattaccaatctcagataaactccgaatgccaacgagatataatcggcagtcagactgcgagtgctaagatccgtagtcgaaagggaaacagcccagaccaccagctaaggtcccaaaatatatgttaagtggaaaaggatgtggggttgcacagacaactaggatgttagcttagaagcagctattcattcaaagagtgcgtaatagctcactagtcgagtgaccctgcgccgaaaatgtaccggggctaaaacatattaccgaagctgtggatacctttataggtatggtaggagagcgttctatgtgcgaagaaggtgtaccgtgaggagtgctggagcgcatagaagtgagaatgccggtatgagtagcgaaagacaggtgagaatcctgtccaccgtaagactaaggtttccaggggaaggctcgtccgccctgggttagtcgggacctaaggagagaccgaaaggtgtatccgatggacaacaggttgatattcctgtactagagtatatagtgatggagggacgcagtaggctaactaaaccagacgattggaagtgtctggccaagcagtgaggtgtgatatgagtcaaatgcttatatctataacattgagctgtgatggggagcgaagtttagtagcgaagttagtgatgtcacactgccgagaaaagcttctagcgttaattatactctacccgtaccgcaaaccgacacaggtagtcgaggcgagtagcctcaggtgagcgagagaactctcgttaaggaactcggcaaaatggccccgtaacttcgggagaaggggcgctgacttatggtcagccgcagtgaataggcccaagcaactgtttatcaaaaacacagctctctgctaaatcgtaagatgatgtatagggggtgacgcctgcccggtgctggaaggttaagaggagtgcttagcaatagcgaaggtatgaattgaagccccagtaaacggcggccgtaactataacggtcctaaggtagcgaaattccttgtcgggtaagttccgacccgcacgaaaggcgtaatgatttgggcactgtctcaacgagagactcggtgaaattttagtacctgtgaagatgcaggttacccgcgacaggacggaaagaccccatggagctttactgcagtttgatattgagtatctgtaccacatgtacaggataggtaggagcctatgacctcgggacgccagtttcgagtgaggcgttgttgggatactacccttgtgttatggctactctaacccagataggttatccctatcggagacagtgtctgacgggcagtttgactggggcggtcgcctcctaaaaggtaacggaggcgcccaaaggttccctcagaatggttggaaatcattcgcagagtgtaaaggtataagggagcttgactgcgagagctacaactcgagcagggacgaaagtcgggcttagtgatccggtggttccgcatggaagggccatcgctcaacggataaaagctaccctggggataacaggcttatctcccccaagagttcacatcgacggggaggtttggcacctcgatgtcggctcgtcgcatcctggggctgtagtcggtcccaagggttgggctgttcgcccattaaagcggcacgcgagctgggttcagaacgtcgtgagacagttcggtccctatccgtcgcgggcgtaggaaatttgagaggatctgctcctagtacgagaggaccagagtggacttaccgctggtgtaccagttgttctgccaagagcatcgctgggtagctatgtagggaagggataaacgctgaaagcatctaagtgtgaagcccacctcaagatgagatttcccatgattttatatcagtaagagccctgagagatgatcaggttgataggttagaagtggaagtgtggtgacacatgtagcggactaatactaatagctcgaggacttatccaaagaaagtaactgagacatattgacaacgatttggtttcttgatacagtatagatattcaattttgagttgagaatactcagagttaagtgacgatagcctaggagatacacctgttcccatgccgaacacagaagttaagccctagtacgcctgatgtagttgggggttgccccctgttagatatggtagtcgcttagcgcatagggagtttagctcagctgggagagcatctgccttacaagcagagggtcagcggttcgatcccgttaactcccataggtcccgtggtgtagcggttatcacgtcgccctgtcacggcgaagatcgcgggttcgattcccgtcgggaccgtcaagtagaaatatttgagactcgttagctcagttggtagagcaattgacttttaatcaatgggtcactggttcgagcccagtacgggtcatatatgcgggtgtggcggaattggcagacgcaccagatttaggatctggcgcttaacggcgtgggggttcaagtcccttcacccgcattagaaaagttagccggcttagctcagttggtagagcatctgatttgtaatcagagggtcgcgtgttcaagtcatgtagccggcataaagatggtccgttggtcaaggggttaagacaccgccttttcacggcggtaacacgggttcgaatcccgtacggactatatttcgagtaacttaggttactctttttattttgtttcttttttttatatgttataatagcttataatactattttgaggtgaatttatgtctaaagtttttgtttttggtcatcaaaaccctgattctgatgcaatcgggtcttcttatggatatgcttatttgaaacgtcaacttggtgttgatgctgaagctgttgctttgggtactcctaacgaggaaactgcttttgttcttgattattttggtgttgaagcaccacgagtggttgagtctgctcaatcggagggagttaatcaagttattcttacagaccataatgagtttcaacaatctatttcagatattaaggacgttgaagttattgaggtagtcgaccatcaccgtgtggctaactttgaaactgctaatccattaatgatgcgattggaacctgttggatctgcatcttcaattgtttttcgtatgtttaaagaaaacaatgttgaagttcctaaggaagttgctggtttgcttttgtcaggtttgatttcagatactcttcttcttaaatctccaactacacatgcttcagatcctgcagttgcagctgaacttgcagaaattgctggtgttaatctagaagaatatggtcttgctatgcttaaagctggtactaatctttcttcaaaatctgctgaagaactcattgacattgatgcaaaaacatttgaattgaatggtaatcaagttcgtgttgcacaagttaatacagttgatatttctgatgttctttctcgtcaagcggaaattgaagaagctattaataactcaattaaaaacaatggttactctgactttgtcttaatgattactgatattcttaattctaattcagaaattcttgcacttggttcaaatactgataaggttgaagctgcttttaattttgttttagaaaataatcatgctttccttgaaggagctgtttctcgtaagaaacaggtagttcctcagttgactgaaagctttaatgcttaaaattaggccataaggcctttttttagtgctctgattaatggtataatacttcttatgataatacaatttaacccaaacaaactatgtaagcaacctttttttatgaaaatagtgaattatctatatcttaatcagcctgtgaccctgagagcaataaaaaggcagtttccttttcaaaagaatatcgataaattaattgaggagtttgtaaaagcaggctatatcgaacgattcgagaaacgttaccgtttattaattagtcttgtgtcggattcttctaaaattgatttagaacagcatttttttattaatgatgattctacttgttatttagaactattaaatcgtagatttgttactgagataagtaattctactaatgaagttgttattattgaacaaacgagtattacgagagacgatcttacgatttcaaattatttctataaattaagagaaaatctaccattatcggaagagcagaatagattatatgatatattaggggatgttaatcctgaatattttttgaaacatgttacgacttttcttttaaaatacgtaaggaaggaatatgcacttcaaaaaaggaggaatatttttgttgatgctttagaattattagggtatcttattcaagtagaagaagggcgttatcttttgaatatggatttagattccgaagcattagtttttagtgcaaaaaaagactagtattattactagtcttttttatgacaactttaacgattccttagttcaagataacgtttgtaccagatgttaacataagattgtgaaaatggccccttaccattgttaatccaatctaccaagattttaacatgttcctttaagatatagtcaatatcaggagagtaatgcatttcttttttatgtgtttcatattcatctacatctagcaattttttttcaccatcagcgaagactttgacatctaggtcatagtcaatatattttagtgcttcttggtccaaaatatatggactagctaaattgcagtagtaggaaatgccgttatccctaatcatggctataatattaaaccagtattttttgtggaaataaacaatagcaggttcacgtgttacccatcgtcttccgtctgcttcagtaacgagggtgtggtcgttaacgccaataacagcattctcagttgtctttagtaccatagtatcgcgccaagtacggtgcaaactaccatcatgcttataactttgaattgtgataaagtcgccttcttttggtaatttcatggcgtcctctttctacaataagggttatcccctttattgtatcataattttgtgaaaagagggggaatacctataaatattctcttagagcggatgctatcgcatcaaagtcataaccttttcgggctaaagcttgtgtcaagcgttgcttaagctcataaccgtcgtattttttactaaatttttgatattgcttatcaatttctttataaaggagagcttgctcattttcttcatctgcttcaagttctagatgatcgattgctagtttactttcttggaatgaaaaacctttattgataaggctttgagttaatttatcttttagggcttttgatggtagttttccctgatattttcgtaacagttttgaagctactttaatggctatttctgagaaatcaaattggcttaaaacatcgtcaatgatttgtttgttacaacctttttgaagccatttttgcttcagcacataggcccctttatcacctgaattcagattttgttgagctagactttctaggagtttgtaatcatcaatccaatgatctttttttagattatcaataatttttggaattatatgagggtttatttcatgtttaaaaaggtaatcttttacctctttctcagtacgttgtttaaatgaaataaaatagagagctaagtttttaccatgcgagaactgagcaaaggatttaatatcctctagttgatctttgtccagtatcatttctttagtcaacatgtatttaacgatggtatcttctgtaacgtagagactctcttttttgtctatctcaaggagataaagtctctttttcttctcgatttttgtgattttcatagttattattatatcaaaatgttagaatggtagtatgaatttacaagtgaaacagcgtatcccgcttaagataaaacgcatgggaatcaatggcgaaggcattggattttataagaaaactctagtttttgtaccaggggctttgaagggtgaagaggtgttctgtcaagttgtttctgttaagagaaactttgttcaggcgaaattattaaaaattaataaaccttctaaatttcgtgtcgaacctgcatgtagtatttatgaagattgtggtggttgccagttaatgcatcttcgttatgataagcaattagagtttaaaactgacttgttaggacaagccttgaagaagtttaaaccggctaattttgagtcatatgacattcgtccaacaatagggatggagcaaccacaacattaccgagctaaactacaatttcaaacccgttcttatggtggctcagttaaatctggcttatttgcagaagggagtcatcgcctcattaatattgatgattgcctagttcaggatgagctaactcaagccattatgaataaggtgacaaaattgttagataaatacaagttaccaatttataatgagcgcaaaattgctggaattcgtactgttatgatacgacgtgctttgggttcaaatcaggtccagttgatttttgtaacctctaaatcagtttctttcacaaaattagttaaggaattgacggaaagttttccagaaatcgtaacaattgctgtcaattataattattcgaaatccagtgagatttatggtcaagagacggaaattctttggggacaagacactattcaagaagaggtactggactataacttcgctctctctcctcgtgcattttaccagttgaatcctcaacaaacagaggtactctatggtcaggctgttgaagctttggatgtggataaggctgaacatcttattgatgcttattgtggggttggtactattggacttgcttttgcaaataaggtaaagagtattcgaggtatggatattattcctgaggctattgaggatgctaggaagaatgccaaatcacttggactggaaaatgctcactatgaggtggggaaagcagaagatatcattccgagttggtacaaggaaggttatcgagcagatgctcttattgtggatccacctagaactggtttagatgataagctacttaaaacgatactggactatactcctgaaaaaatggtatatgtttcatgtaatgtatccactttggctagagacctagtttctttggctaaagtatatgatgttaattatatccagtcagtagatatgtttcctcatacggctcgaacagaagcagttgtgaagctaactaagaaaatgtgataaaacctaacataaaaaacaagaaattttcaaaattgttggaaaatttctttatttttctgaaaaataggagtataataggcttatcgattttttaaaggaggagcgtatgaaaaagagcttcattcatcaacaagaggaaatttcttttgtgaagaatacttttacacagtatttgattgataaacttgacgtcgttgaagtgcaagggcctattttgagtaaggtcggggatggtatgcaggataatttgagcggtattgagaatcctgtaactgttaatgtgcttcagattcctgacgcaacatacgaagttgttcactcattagcaaaatggaaacgccatactttggctcgttttggtttcaatgaaggtgaagggctcgtggttaatatgaaggctcttcgtccagatgaagattcattggatgcaacgcactctgtttacgttgaccaatgggactgggaaaaagttattcctgacggacatcgtaatatcgcttatttgaaagaaactgttgaaaccatttataaggttattcgtttgactgagctagcagttgaagcacgttacgatattgaagcaattttacctaagaaaattaccttcatccattcagaagagcttgttgagaagtaccctgatttgacaccaaaagagcgtgaagatgctattaccaaggaatatggtgctgtattcttgattggtatcggtggtgttcttcctgatggaaaaccacatgatggccgtgcacctgactatgatgactggacaactgagtctgagaatggttaccatggtttgaatggagatatcttggtttggaacgaacaattaggacatgcttttgaattgtcatcaatgggtattcgtgttgatgaagatgcccttaaacgtcaggttgaaattactggcgaccaagatcgtttgaaattggattggcaccaagccttgttacatggccttttcccactaacaattggtggaggtattggtcaatcacgtatggctatgttcttgcttcgtaagaaacatattggtgaggttcaaacttcagtttggccagatgccgttcgtgaaacttacgaaaacatcttgtaaaaaaaagcactaacgaaagttagtgttttttggtttgcaatagctatgcataattgattaatgaataggctattggagtagatatgataagagctggcttagtttttctcataaagaaaaacctttcccctgaaggagataggtttttagattagtcgtcactacggaaaaaggcatcataaagagctctgacggctgctttttcttgctcagtttcaattacgaacataacagaaacctcactagaaccttgagaaatcatttctaggttaatatgtttttcagagagcgctttagctgctgtcgctgtaacaccgatgtggtctttcatattttcaccaacaatcatgagaattgaaaggccatgttcaatttcaacttcatcaacaccgagttcacgagtcaagtatgaaaggatttcttgttctttgattggggtaagttcacgttctcgaataatgattgaaagatcatcgattccagaaggcatgtgttcccaacggatgtttaaatcttccaagatttgaagaaccttacgtccaaaaccgacctcacggttcataaggtatttgctcatattaatacttacaaatttgtcatcactagcaataccaacgacaggaactgttgcacccttgtgctcaagaataatacgagtaccaggatgagatgggttatttgtgtttttaataacgagcggaatcttaccacggtaggcagggaggagggcttcatcatgaagtacagagaagccagcataagccaattcacgcatttctttgtaagtcaactctggaattgaatgtggttcatggacaaccccaggatgggctgcgaaaataccatctacatccgtaaagttttcgtataaatcagctttcacacccgctgcaacgatagatcctgtgatatcagagccaccacgtgagaaagtacaaatttgattatcaggggtaacaccaaagaaaccagggataacaagaacctcatctgattcacgaagctcttccaatttgtcataggctcctggaaggatacgagcatttccaggttcgcttgagacaaaaatgccagcttggcgagggtgaacgtaacgtgcttcaataccgttattacggaaatactcagcaatcagttttgcgttattgtcctcaccagcggctagaaatgtatcgtagaggaattcgttatcctcgatagggagggttgctaaatcattgatagatttggctattttagccatttctgttgatttgaagcctagctcatcgaccatagcttggtagcggttaataatccattcttggtcagctttgacatcaacaccctttgtgtagtgtttatagtatttaatcaaggcgtctgtgactttggtatcttcatcgttacgtttacctggggcagagacaacgacaaagcgacgttcaggatcagattttacaatgtttaagactttttctaattgtgtggctgaagcaagtgagcttccaccgaatttgatgactttcatagttactccaaaaattttaaattaccctacaattatagcaaaattctgacaatttgtcacattgtttttaaaagcgagtaagatttagtctgaatatggtacaataaggtaagaaaaaggaggatatcccgtggtagaggcaattatttttgatatggatggtgtcctttttgacactgaaaaatattattatgatcgacgtgcaagtttcttagctcaaaagggaatttcaatcgaccatttacccccgtctttctttataggtggaaataccaagcaagtttgggaaaatattctcagagatgactatgataactgggatgtgccaactttacaagaagagtataatgcctataaacaagacaaccccttaccctataaagaattaatctttcctgatgttttgaaagtcttgaatgaagtgaaatctcgagggttgaaaataggtttggcttctagctcagtgaaggtagatatccttagagctttagaggaaaatcatttggatggtttctttgatgtggttctctcaggagaagaatttaaagagagtaaacccaatccagagatttatctgacagcattgaagcatttgaatgtggaagcaaatcaggctttgattatcgaagatagcgcaaaggggattgctgctggagtcgctgcaggtgttgaggtttgggctattaaagataatcgttttggtatggatcaaggtgcagccaaaggcttgttggataaccttatagatgttttagatttattaaaatagaagtgacaccgagttgtagaactcggtgttttgatgtatcaaattaaaaaactctaagtttctgttgacctttagatggactatggtatactagaaaataacgatgaatgatttgataatcaaattatctattcatcaaataaaattgtgataaaaatataaagaacatacgtttttcatataggaactagttatcggaggaatgcaaaaaatggcttacgaaacaattctttatagtgttgaagatggagtagcaactttaacgcttaatcgtccagaagtgcaaaatgggtttaatattccagtttgtgatgagattatggctgcaattgaggaagctaaacaagatgcgtcagtaaaatttttggtaatcaatgctaatggaaaagtcttttctgttggtggtgaccttgatcaaatgcaaaaagcggttgctgtagatgatgtacagtctttggttcgtattgctgagcaggtaaatgaaatttcttttgctcttaaaaaattccctaagccagtcatcatggtagttgatggaccatgtgcaggtgctgcagctaacttagctgttgcagcagactttacgatcgcatctgataaagctaaattcatccaagcttttgtaggtgttggtttggcacctgacgctggaggtctctaccttttgacacgttcaatcggtattaaccgtgcgactcaaattaccatgacaggagagccagtatcagctgaaaaagccttggactggggaattgcctacaaagttgttgagtcagaaaaacttgaaaaaactgtgagtcaattgattaaaaaattgaaccgctcttcagtgaattcctttaaagccattaaagaaatggtttgggaatctgaatttgcaggatgggaaaattacgctaagttggaacttgacttgcaaaaatctcttgctttcacagaagacttcaaagaaggggtacgtgcttatagtgagcgtcgtcgacctaaattccaagggaaataaccacatttttctaaaagaaaaactaaagttttttaatcgggcttgcgaaattagtttgagtctgatataatttgaaagtcaaagttttattgaaaggagtctggtgtgaattacgacaaaattgatggctatcttgttgatatttttaataacgtagttattatcgaagaagcaagtttaaagaattcaaagtttaacgatgtttccctcaaggaaatgcataccattgatgtgatcggtacacatccagatacgacaccaagtgcagtagctaaagaactcatgctaactcttggtactgtaacaacttctctcaataaacttgaaaagaaaggttatattgtccgtacgcgttcatcagttgaccgtcgtgtggtccatttatcgctttctaaaaagggtcgtttggtatatcgtcttcaccgtcgttttcataaatcaatggtgatgaggattacagaaggctttaacgacgaggaattgaaggttatgagcaagggattggaaaatctccacgcatttcttgaggagttgaaataatggcatttgcaaaaattagtcaggttgcccattatgcacctgctcaggtcgtgactaatgatgacctatcaaaaatcatggatactagcgatgagtggattcgctcacgtaccggtattcaggaacgtcgcatctcattgaatgagaatacgagtgatttagctactaatgttgctcatcagctattagaaaaatcaggattagctcctgaggagctagactttgttttagttgcaacgatttctcctgatagctcgatgccgtcggtggcagcgcgtgttcaaggaacaattggagcagtcaatgcctttgcttttgatattactgcggcatgtagtgggtttgtctttgctttagcaaccgcagaaaaattgataaagtcagacgcatacaaaaaaggtttagtcattggttctgaagttctttctaaaacgttagactggtctgatcgcacaacagcagtccttttcggagatggtgctggcggtgttttattagaggaatctgaagaagaacatttctttggtgaatctttaaataccgatggtagcaagggtggtcttgagtcaggagcctctgcagttatctcgccttattcagatgagtctgatcagcctaatccctatatgcaaatggatgggaaagcaatctttgattttgccgttaagacggtttcaaagagtattaaggccttggttgaagaaaaaggtgagcctgattacttccttcttcatcaagctaatattcgtattttggatattatggctaagaaaatcgatgtcagtcgtgataaattcttggcaaacatgatgtcttatggtaataccagtgcggcaagtatcccaattctgctttctgaaaatgtggcgaatgggaccttaaaattagacagcggtcaaacaattctcttatcaggttttggtgggggtttgacatggggcagtcttattgttaaaatctagttatataaattatgcaccagcatagattataagaaatatatttatcttaaaggagaaattaaaatggcagtatttgaaaaagtacaagaaatcatcgttgaagaacttgggaaagatgcagaagaagtaaaagtagaaactacttttgacgaacttgacgctgactcacttgacgtgttccaagttatctcagaaatcgaagatgaattcgatatccaaatcgaaactgaagaaggtcttaacactgttggtgaccttgttgcttacgtagaagaaaaaactaaataagcagggcatagagaatattcttatttgggatattctcctttgtttatacaattactttgattattaaactatttatttgattagaaaatcgaaaaaaggtgcaaaatgaaatctcgtattacagaacagttaggaattaaatatccaatcttccaaggtggtatggcctgggttgctgatggcgacttggcaggagccgtttcaaatgctggtggactcggaattattggtggtggtaatgcccctaaagaagtggtaaaagctaatattgatagagtaaaacaaatcactgataaaccattcggtgttaatatcatgcttttgtcaccatttgcagatgacatcgtcgacctcgttatcgaagagggcgttaaggttgttacaacaggagccggaaacccaggtaaatatatggagcgtttccacgaagctggaattacagtaatcccagttattccatcggtagcacttgctaaacgtatggaaaaacttggagcagatgctgttgtcgcagaaggtatggaagctggtggtcacatcggtaaattgacaactatggcacttgttcgccaagttgctgatgcggtatctatcccagttattggagctggtggtgttgctgatggacgtggtatggctgctgttcttatgcttggagcagaagctgttcaggttggtacgcgtttcgctgttgccaaagaatctaatgcacaccaaaacttcaaagataagattttgaaggctaaagatattgatactgttatttcagcctcagttgttggacacccagttcgtgcgattaagaataaattggctactgaatataaccaagctgaaaaagatttcttggctggtaagaagactcaagaggaaattgaagagcttggtgcaggtgcccttcgtaacgcggttgttgatggagatgtggaatatggttcagttatggctggacaaattgcaggtcttgttcgtaaagaagaaacatgtgcagaaatcttggaagacctttacacaggcgctgccaaggtgattaaagaagaagctgctcgttgggcagatgtaaacgtctaaaaacgtcgaaaggattaggatagtgacaaaacgtgcgttcttatttgctggtcaaggggctcagaaattgggcatggcgagcgatttgtatgcgacttatcccgttgtcaaagagacatttgatacggctagtcgtattctaggttatgatttgcgtgaattgattgattctaacgaagaaaaacttaatcagacacgctatactcaaccagctattttgacaacgtcagtagccatttatcgccttttggcagaaaatggtatcactcctgatattgttgccggtctctctttgggtgaatattctgccctagttgcggctggagcactctcatttgaggatgcggtagccctggttgctaaacgtggagaattcatggaaacagcggctcctgctggaagtgggaaaatggttgcagtcatgaatacagatccaagtttgattgaagaaatctgtcaaaaagcatctgaaaagggtgtagtaacgcctgctaactataatactccagcacaaattgttattggtggtgaagttgaggctgttgattatgctgtggaattgcttaaagaagctggtgctaaacgtctgattcctcttaatgtttcaggaccgttccatacagctttacttgaatcagctagtcaaaaattggcagcagaacttgagaaagtgtcattcaatgactttacgcttcctttagtaggtaatactgaggctcaaatcatgaagtcagaagacgtcaaagcacttttggctcgtcaggtgatggaacctgtacgtttttatgattcgattgccactatccaagaatttggtgtagatgaagtgattgagattggtccaggaaaagtcttgtcaggtttcttgaagaaaattgataaaaccctaccaactcaaaatgttgaagatcaagctagtcttgatgcccttcttaatgcgtaaaacgaggtaaacatggaacttaagaataaaaatgtttttgtaacaggttcaacacgtggaattggattagctgtggcacataaatttgctagtcttggtgccaacgttgtcctaaatggacgttctgaaatctctgaggacttgcttgcacagtttgcagattatggtgtaactgttgttggtatctcaggtgatatttctaatggtgaagatgctaaacgtatggttgcggaagctattgaaaagcttggtagtgttgacgtgctagttaataatgctggtatcactaacgataagttgatgttgaagatgactgaagaagattttgaacgtgtcttgaaaatcaacttgactggtgccttcaatatgacacaagctgtcttgaaaccaatgtctaaggcgcgtcaaggtgccatcatcaatatgtcatctgttgtaggtcttatggggaatattggtcaagctaactatgcagcttcaaaagctggtttgattggtttcactaaatcagtagcgcgtgaagttgcggcccgtggtgtccgtgtcaatgctatcgctcctggtttcattgaatcagatatgactgacgctattccagagaaaatgaaagatgctatgattgctcaagtaccaatgaaacgtattggtcaagcagaagaagtggcagaagttgcagcattcttggctagtcaagaatatctcacaggtcaaaccatcgctattgatggtggtatgactatgcaataattgattttcaatatcaaaaaatcatttactacaatatccatccgacaaaaggagaatatatatgtctacaaatcgtgttgttgttacaggttacggcgtaacctcaccaatcggtaatacaccagaagaattttggaacagtcttcatgacggtaaaattggtatcaagccaattactaagtttgatgcttctgaaattccagtctttaacgctggtgaaatccaagatttcccgttcgataagtactttgtgaaaaaagatactaaccgtatggacacttactcactttatgcgatttatgctgctatggaagctcttgaaaattcaggacttaacatggaagaagaagatcgtgatcgtgttggtgttatcgtgtcatctggtatcggtggtctccaagaacttgaagatcaaatcattcgtatgcacgaacgtggtatgaaacgtatcaaaccaatgtttatccctaaagcactctcaaacatgggtgctggtaacattgctcttaaaattggtgcacaaggggtatgtaaatcagtgacgactgcttgtgcctctgccaatgatgcaatcggtgaggccttccgtgaaattaaattcggtttgcatgatgttgtcttggctggtggtgctgaagcttcaatcactaagattggtatcggtggtttcaatgctcttacagcactttcaacaacagaggatccagaacgttcatcaattccatttgataaagaccgtaatggttttgttatgggtgaaggtgcaggggttctcgttatcgaaagcttggaacatgctcaaaaacgtggtgctaacatcttggctgagattgttggttacggatcaaattgtgatgcctaccacatgacaacaccaactccagacggttctggtgctgctaaagcaattaaattggctatcaatgaagctggtatcaaacctgaagatgttgattatgttaatgctcacgggacatcaacacctgccaatgaaaaaggtgaaagtggtgccattgtttctgtacttggtaaagatgtaccagtttcatctactaaatcatttacaggtcacttgctaggtgctgctggtgcggttgaggctattgcaacaatcgaagctattcgtcatagctatgtaccgaaaactgctggtacaaaagaattgtctgactacatcgaagctaatgttgtttatggtgaaggtcaagaagctgatattgagtacgcaatttcaaatactttcggttttggtggacacaatgctgttcttgcctttaaacgttgggaggcttaattcatgaatatttctgaaatcaaagatttgttggctcaatttgatgcatcaactttgcgtgaattttcatacaaaaacaatggtgaagaattgaacttgagcaaaaatcaaacaagttcagtaacagctgccccagtagctcctacagttgaagtagttgcgccagctcctcaggctccggttgctccagtagcagcacctgctgctgttgaaactccagcaacaccagttgaagaagcttctgcaccagctcaagctgctgaaggagaagtggttgaaagtccacttgtcggtgtggcttacttgtctccatcacctgaaaaaccagcctttgtttctgttggcgacactgttaagaaaggtcaaactcttcttatcgttgaagcgatgaaggttatgaatgaagtgccagcgcctaaagatggtgttattactgagatcttggtagcgaatgaagaagttgttgactatggaaaaggattggtacgcatcaaatgacaattgatattaatgctattcgtgaagctttaccacaccgttatccaatgcttttggttgaccgtgtgctagaagtttcagaagacgaaatcacagctattaaaaatgtaacgatcaatgaacctttctttaatggacattttcctcaatacccagttatgcctggcgttcttatcatggaagctcttgcgcaaacagctggtgttcttgaattgtctaaacctgaaaataagggcaaattagtcttttacgcaggtatggataaggttaaatttaaaaaacaagtggttcctggtgaccaacttgttatgacagctaagtttgttaaacgtcgtggaacaattgctgttgttgaagctaaggctgaagtcgatggtaaacttgctgcatcaggtactttgacttttgctattggaagctaatgttttgtgaaaatccttctggcgacagtcggaaaggatttttctttagacattggtctatcacatagaaaggaaatcaacacagactatcaaaaaatgtctgatgttatcttgttttatgtttaaaaaattattgattgccaatcgtggtgaaattgcagtgcgtattatccgtgcagcgcgtgaattgggtatccaaacggttgctatttattctgaagcagataaggattctctccatactatgcttgctgatgaagctatttgtatcgggcctgcaaaatcaacggattcttatttaaatatgaatcgtgtcctatcagctgctattgtgactgaggctcaagctattcacccagggtttggtttcttgagtgaaaactctaaatttgccactctctgtgaagaaatgaacatcaagtttattggtccttcaggcgaagtcatggacaagatgggtgacaaaatcaatgcccgtgctgaaatgattaaggctaatgtccctgtaattcctggttcagatggtgaagtctttacagctgaggaggctttggaagttgccaaccgtcttggttacccagtgatgcttaaggcttctgccggtggtggcggtaaggggattcgtaaggttaacactgaagaagagttagctccagctttcgaatctgcgtcacaagaagctaaagcagcctttggtaatggggcgatgtatattgaaaaagttatttacccagctcgtcatatcgaggttcaaattttgggagatagctacggtaacattgttcacctaggtgagcgtgattgctctcttcaacgtaataaccaaaaggtcttggaagaatcaccttcagttgctattggtaagactcttcgtcacgaaattggttctgcagctgtccgtgccgctaaggctgtaaattatgaaaatgcgggtactatcgagttccttcttgatgaaaaaacaggtcagttctatttcatggaaatgaatacccgtgttcaagttgagcacccagttacagaatttgtaagtggtgtggatattgttaaagaacaaatccgtattgccgcaggtgaaaaactctctgtgacccaagatgatattgaaatcaagggacatgctattgagtgtcgtatcaatgcagaaaatcctaagttcaactttgcacctagtccagggaaaattagcaatctctacctacctagtggtggtgttggtcttcgtgtagacagtgcagtttatcctggctatactattccaccttactatgattcaatgattgctaaaatcattgttcatggagaaaatcgatttgaggcactcatgaagatgcaacgtgccctttacgagctcgaaatcgatggtgttgtgactaatgctgacttccagttggatttgatttcagatcgtagcgttatcgctggggattatgatacttccttcttgatggagaccttcctaccagattatcagaatcgtgaggaataaagtttatgggattatttgatcgaaaagaaaagtatatccgtatcaatcctaaccgttctgtacgtaatggggttgatcaccaagtgccagaagttccagatgaactttttgccaaatgtcctggttgtaaacaagctatttatcaaaaggacttgggacaagctaaaatctgtccaaattgttcttataccttccgtatttccgctaaagaacgtctcgatttaacggttgatgaggggtcattccaagaactttttactggtattaaaactgaaaatccattgaatttcccaggttatatggagaaattagcagcgactaaggaaaaaacgggtcttgatgaagctgttgtaactggtgttgcaagtatcaaggggcaaaaaacagccttggccattatggattctaactttatcatggcttcaatgggaactgttgttggtgagaaaatcaccaaactctttgaacatgcgattgaggaaaaacttccagttgttatttttacagcatctggtggtgcccgtatgcaagaaggaatcatgagtttgatgcagatggccaagatttcagccgctgtaaaacgtcattcgaatgctggcttgttgtatttgactgtattgacagatccaacaactggtggggttacagcaagtttcgccatggaaggtgatatcatcttagctgagccacaaaccttgattggtttcgcaggtcgtcgtgtcattgaaaacacagttcgcgaaactttgccagatgatttccaaaaggctgagttccttcaagaacatggttttgttgatgccattgtcaaacgtacagagttggctgataccattgccacactcttatcattccatggaggtgttcaatgagcgacgtagcacgtattttaaaagaagcgcgtgatcaaggccgtttaactgctttggactttgcccaaggaatcttcgatgactttatcgaacttcatggcgaccgtaatttccgtgatgatggtgccgttattggtggtattggtcgtttaaatggtcaagctgttactgtagtgggtattcaaaaaggtagaaatcttcaagacaaccttaaccgtaactttggccaaccacatccagagggctatcgtaaggctcttcgacttatgaaacaggctgaaaagtttggtcgtccagttgttacctttatcaatactgcaggtgcttatcctggtgttggagcagaggaacgtggacaaggtgaggcaattgcgcgtaaccttatggaaatgagtgatcttaaggtgccaattattgccatcatcattggtgaaggtggttcgggaggagctcttgccttggcggtagccgataaggtttggatgcttgaaaataccatctactctatcttgagtccggaagggtttgcgactattctctggaaagatggctcacgttcagaagaggcagcagagttgatgaagattacatcaggcgagttgcttaatatgggaatcgttgataaggtgattccagaacgtggttactttacaagtgaaattattgaagcaattaagacagcaattgtagatgagttggcagaattaagccaattatcaacagaggacttgcttgaagcgcgttatcaacgttttagaaaatactaaaaaaacattgggatatatcccaatgttttttaaacggtatgacgttcgaaggcttggtctgagataccttgttcgaggataagtttagcccattccttagctgaatgaagactgtgatccttgtagttaccacaagattcaatggtagttcctggaacatcttcccatgtaatctcgttagcaatagcttcaagactagatttgataactttagcaatttctgtaggatcttgtttaccccacataatcatatggaagcctgtacggcaaccaaatggtgagcaatcaataagtccatcgatacgttgacggatcagtttagcgagtaggtgttcgatagtgtgaagaccacctgtgtcaatactattttcattaggttgaatcaaacggatatcaaagtttgtaatgatatctcctttaggtccaacttcctcagaaataagacggacataaggtgcttttacaatggtgtgatcaagttcaaaactttcaacagtaacgtcttttggcatggtaatacctccctattctaatagagttatgataccataaaatcagtttaaagttctagtatatatttgagaaatcgctataaatatgatacactagaagacggttttctttagggaaaccttagaaaagttgaggtaaagacatgataaacatgataattttagttgtctttgcactcattggtttagtcgttggatatttagcaatttctattaaacttagcaaagctaaggaacaagcagaaactaccttgctaaaggcagaacaagacgctgtgaaccttcgcagtcaggcggaacatgatgcagatcatctgcgtgtaactgctgaacgcgaaagtaaggctcaacgtaaagagttcttgttagaagcaaaagaggaagctagaaaatatcgagaagatattgaaaaagaattcaaatctgaacgtcaagagcttaaacaaatggaaaatcgtttgacagaacgtgccactagccttgatcgtaaggatgaaaatctatcaagtaaagaacttgccctcgagaagaaagagcagagtcttgctgacaaatctaaacatcttaatgagcgtgaagagaatgtgactcagttggaggctgagaagcaagctgaacttgaacgtgttggtcagatgaccattgcagaagcgcgtgaggtaatcttaacggagactgagaataatctgactcatgagattgcaacacgtatcaaagatgcagaagcacaggttaaagatactgttgataagaaagccaaaaacgtgttggctcaagctatgcaacgcttggctggagattatgttactgaacaaacagtaactactgttcaccttccagatgacaatatgaaaggtcgtatcattggacgtgagggtcgtaacatccgtacgcttgaaagtctaacaggtattgacgttattattgacgatactccagaagtggttgtcctttctggtttcaatcccgttcgtcgtgaaattgcacgtatgactctcgaagctttgattaaggatggacgcatccatccagctcgtattgaagagttggttgagaagagccgtcaggaaatggataaccgtatccgtgagtatggtgaagaggcagcctacgaaattggtgctatgaatcttcaccctgacttgatcaagattatgggacgcttgcagttccgtacgtcgtatggtcaaaacgtacttcgtcactcagttgaagttggtaaactagcaggtatcatggctggtgaattgggtgagaatgttgccctcgctcgtcgtgctggtttccttcacgatatggggaaagccattgacaaagaagtcgaaggtagtcacgtagagattggtgctgagtttgcacgtaagtacaaagaacatccagttgtggttaacgctattgccagccaccatggcgatgtagaacctgagagcgtcattgcagttattgtagctgcagcagatgctttgagttcggctcgtccaggggctcgtaatgaatctgttgagaattatgtcaaacgccttcgtgatttggaagaaattgcatcaagctttgacggtgttcaaacaagcttcgcccttcaagctggtcgtgagattcgtattatggttcatccaaacaaaatctcagatgatgaagttacaatcttgtctcataaggtacgtgaacaaattgaaaagaatttggattacccaggaaatattaaggttacagtcattcgtgaattccgtgcggttgactatgccaaataagataagagagccgaaaggcttttttattttgcactggatactgaaaggttgtattctttttgaaaatgtaagaactttcttatcaaattgcgtcattttggtagattagtgttttgtaatgaaatattttgattttttttgactgtttttagttgacagttattaaaaattgagtataatagattttgtaaacgattacagaaggagagattatgctaaagtctgaacgtaagcagattatcttgtctcagttgaaacaagatggttttgtcactttggaaaacctaactgttttgttaagtgatacttccgagtcgacgattcgtcgtgacttggacgagttagcggcagatggccaacttaaacgtgttcatggtggtgctgaaagcattcatggtctaaaggaagaaattgccaatagtcaaaaagctattagaaacgttcaagaaaaggctcagttagctggttatgctgccgatttgattaaggaaggtgatgtcgtctttcttgaggctagtacaacaaatgaacttttgattccacatttggccaatcgtcaggtaacggttgtgactaattctatccatcatgcggttaagctggtagatctcggtgttagcactaggattgttggaggaaaggttaaacattcaacggatgcgtctattggaagtactgctcaagagcaaattagacaactgaattttgattgtgctttcattggtgctaatggtgttgatgctaattatttcaccacaccagacatggaagaggcagttattaaacgggcggttatagctaatgcgcaaaaagcctatgttctagcggatgcctctaaacttggtcagattacctatgctaaggtagccgaggtcgagaaagtaaccataattacaaatgcttcggaagaagagctcctaaaagaattaaaagagaaaacgagggttattgaagtatgatttatactgtaacgctgaatccatcaatcgacttcattgttcgtatcgacaaagtagagattggtgaagttaaccgcatggagagtgatgataagttcgctggcggtaaggggattaatgttagtcgtattttgcaacgtttaggtgttgataatactgcaacgggcttcatcggtggttttacaggacgttttgtgacagatggtttagatgcagaaggtattaaaactaagtttgtagctgtggatcaagacacacgtattaatgttaaaatcaaggctgaccaagaaactgaaattaacggtgcaggacctgtcattaatgagtatcaattggctgaattggaagcagttctttcaagtgtaagtgctgctgatgtggttgtttttgctggatcagcaccaagcaatcttggaaacaaggtctataacaaattgattccactagtgcgtgaaactggtgcacaggttgtctgtgactttgaaggtcaaaccttgcttgattccttggcttaccaaccactcttggtaaaaccaaataaccatgagttagaagctattttcaatgtcaaacttaatggtttggctgatgttgaaaagtatgcgcgtgaaatccttgctaagggtgcacagaacgttatcatctcaatggcaggtgatggagcgcttcttgttactccagaggctgcttactttgctaaaccaatcaagggaacagtaaaaaactctgttggtgcgggtgactcaatggttgctggtttcactggtgagtttgttaaatcaggtgatccaattgaggctctcaagtggggagtagcatgtggaacatctacggctttctcagatgacttagcgacaattgaatttattaaagaaacatacaataaagtagaggtagaaaaactatgaaaattcaggatttactgaacaaaaaagtaatgttgcttgaccttcaagcaactacaaaagaagctgctatcgatgaaatgattaacagcatggttgacaacggtgttgtgactgactttgatgttttcaaagcaggtattatggctcgtgaagcacaaacatcaactggtttgggtgatggaatcgctatgccacacagtaaaaatgctgcagtaaaagaagcaacagtactttttgctaaatctaataaaggtgtagattacgaatcacttgatggtcaacctacagacctcttctttatgattgctgctccagagggagcaaatgacactcacttggcagcccttgctgagttgtcaaaatatcttatgcaagatggttttgcagatcgtttgcgtaaggtgacttctccagatgaagtgattgctgcttttaatactggcgaagaagaagcacaagctgaggaagctaagaaagcacaagctgttaaagaagcagcttcaagcgataaaccacttatcgtagctgtaacagcttgtacaactggtattgctcacacttacatggctgaagaatcactgattaaaacgggtgaagaaatgggagtcaatgttcgtgttgaaactaacggtgcttcaggtgtcggaacaccattgactgctgaagaaatcagtaaggctgtaggtgttatcgtagcggcagacaaggcagttgaaacagcacgttttgatggtaaaaaattgctttctaaaccagtcgctgcaggtattcgtcaacctcaagaattaatccaaaatatcttggatggtaaggctgaagtcttccatgccgaaaatgctggagctgctcaagaatcaagtgagaaattgagcctcggtggtgccttctataaacacttgatgagtggggtatcacaaatgctcccattcgttatcggcggtggtatcatgattgcgcttgccttcttgcttgaccaaatcatgggtgttcctaaagatcaattgtcacaacttggttcttaccatgaaattgctgctcaattcaaagcaattggtggtgcggcctttggtttcatgcttccagtacttgcaggttacattgcttactctatcgctgaaaaaccaggtttggtttcaggttttgtagctggtgctatcgcatcaagtggtgcagcctttggtggtgttccatttggttcaggtggtaaagcaacccttgcccttgctggtgtatcttcaggtttccttggagctcttgttggtggtttccttgcaggtggtgttatcctcgttcttcgtaaactcttggcaggtatcccacgtgctcttgaaggaatccgttctatcttgctcttgccacttctaggtgtatttgctacaggtttcttgatgttggcagtgaatatcccaatggcagcaatcaatacaggtcttaataacttcttgtcaagcttgtcaggaagctcagccgtattacttggtctccttgttggtggtatgatggcagtggatatgggtggaccagtcaacaaagcagcttatgtctttggtacaggtactctcgcagcaacagtaacttcaggtggttcagttgttatggcagcagttatggcagctggtatggttcctccattggcagtttttgtagcgacactcttatttaaagataaattcaccgaggaagaacgcaactctggtttgacaaacatcgttatgggactttcattcatcactgaaggtgcaatcccattcggtgcagctgacccagcacgcgctatcccaagctttatcgtcggttcagctattacaggtgctctcgtaggtatggcaggaatcaaattgatggcaccacacggaggtatcttcgttattgccctcacttcaaatgcccttctctaccttctcttcatcttgattggtgctgtggtatcaggtatccttttcggattcctccgcaaaccacttgataaataagatatgattaaacaatctcgttgagttcggggttgtttttttgtgtcgtagcagatttttgtcagggtacctattttatgataaagtataggcagaaatggcttatctagtagctaatacgctgtataaagaaacataagaggtaaaatatggtaaaagaatacgattatattgtcattggaggtggttctggtggtattgctagtgccaatcgtgctgccatgcatggtgctaaggtgattctctttgaaggaaaagaggtcggaggtacctgtgtcaatgtaggttgtgtgcctaaaaaggtcatgtggtatggtgctcaggttgctgaaacccttcaccgttatgcaggtgagtacggttttgatgtgacgattaataagtttgattttgcaacgcttaaggccaatcgtcaggcttatatcgaccgtatccatggttcttatgagcgtggttttgatagcaatggcgttgaacgtgtatacgagtatgcaagatttgttgaccctcatacggttgaagtagcgggtgagcgttatacagcaccccatatccttattgcgactggtggtcacgccctttatccaaacattccaggtagtgaatatgggattacctccgatggtttctttgaactagatgaggtgccaaaacgtacagctgttattggtgctggctacatcgccgttgaggttgctggtgttctcaatgctcttggaagtgatacacacctctttgtgcgtaaagatcgtccattgcgtacctttgacaaggatatcgttgatgttttagttgatgaaatggctaaatctggtccaaccctccatacgcatgctaatgcgacagaggtagtgaagaatgcagatgattccttgaccattagttttgataatggagaaacgattactgttgattgcctcatctgggctattggacgcgcagccaacacttctggttttagacttgaaaagacaggtgttaaattgactgaaaaaggaacaatctattcggatgagtttgaaaatacatctgttcctggaatctatgcccttggtgatgtgactggtaaacttgatttgacaccagttgcagtcaaggctggacgtcaattgtcagagcgactcttcaacaataaagctgatgctaagcttgattacactgatgtagccaccgtggtctttagccatccagttattggttctgttggcttgactgaagaaaaagcaatcgctaagtatggtgcggagaatattaaggtttataaatctagtttcacaccaatgtatacggcccttggagagaatcgtcagccttcaaccatgaaattagtaacgcttggtgacgatgaaaaaatcattggtcttcacggtattggctatggtgttgatgagatgattcaaggtttctctgtggctattaagatgggagcaactaaggctgattttgataatacagttgccattcatccaacaggttcagaagaatttgtaacgatgcgatagaaaagtgaagtctgttaactgagagtttcagacttttctttgtgtctgaatggcttcaattgaaaccattcactcaacgggttcagaagaatttgtgacgatgcggtagaaaagtgaaggctgttaaccgagagtttcagacttttctttgtgttcaaatagcagcctacactttgtgtaaaattatagattgtctaaataaaataaggccttcaggccttattttatttaattaagtagtttcttactgctgatataaagtaaagagatccagtgacaacaaataagtcctcagaatctgatgattcagcttgtgctagccagtctctatagtcggctgcacgtttgaagtctttgggatagtcgtccaagggcagtgcctcaaaaaagtcaaagctggttaccgttatatcataatctttcaattcctctagtaagtctgccaaaggctttcgtctaagtcctgcaaagaggatatgtaccctacgattagcgaagttatcttttagtacctgctttaagctggcaattccttgagggttatgggcaccatctagataaatgttatttcctatccactcactacgaccaggccaatgcgtctcttcgattccttcttggatgctcttatcggtaatcttagaaaatgtttgagctaagagatgggcagcagtgacagctagcccagcattgttttcttgatgctgtcctaacattggaagtttaagatttggactttcccaatggtcataagaaatttggatcgtttgatcttctttcgaaagcagctgaatttccctatcaatgatggctaaaggagcttgtaggtcatgtgatttttggtcgaagaaatgttcaacttctgtagagacccgaccaagtaagatgggtgtattttctcgcatgacgcctgccttatgattggcaatgtccaaaaggctattgcccaaggtctcagtgtgatcaaagccaatcgaagtacagatgacaagctccggcgaaagaacattggtcgaatcaagtcgtccaccaattccagcttcaatgatagccatatcaacctgtttaaggtcgaagtagaggaacatgagtaaggtgaccaattcaaattccgttggtctgccaaaattagtgtgctcttctaaaccattgagaataacctgagctttcgcgacaaggctaatcaaatccttatcaggaatttctgtgccgttaatactaatacgttcgttgaagcgagtaatataaggggaggtgaaagtcccgacctgatagcctgactttgttaggatattttgtaggtagctagttgttgaccccttaccgttggtcccgacaatatgtaccgttggatagtgagactggggatctccagcttgtttcaagagccaacgcatacgttcgagttgagggcgacggccattgcccttgaaagaatggataaaatttagagtttctgtatagttcataggattatagaaaaaaggcagggtttcctagccttttacatgtcttagttagaagcggcgtcaccagttgttgcaccaccagtagtcgcattgccagatgttgtgtctgcagtagctgctgatgaagaggtagtcgtattgccacccgttgttgtatctgcagatgacgaataggtgttagttcctgcttggctacttgtttctgtttctgaatcagtcgcattgccataactagatgaggaagcactagattcttgagtcttattattgccttctttgatgactacagttgattgattggctgatgaatcagaagtgtccttatttttagaggctgtgaaattcatgatagtgattgaagccacgatgattgacaaaattgtcccgacggcagtaaggactttttggaaggcagtgaagccttttgtaacgtgttcagtcacctttggggcagattttttttcttcttttgatgaatgattacggcgtgagtaattttcagacatgatgctctccttaaaaatatttcgtactttctattatatgattttctcgcaaaaattgctaaaaaaattatgctataataaatagtaaataaaaatcgaggaaaaatcatgatttattttgataattcggccacgacggtgccttatccagaggcacttagaacctatcaagaagtggctactaaaattttggggaacccatccagcctacaccaattaggaacatctgcgacacgtattttggaggcttctcgtaagcaagttgcggaactcattggaaaatcagccgatgagattttctttacgtctggaggaaccgaaggtgataactgggtcatcaaaggtgtagctttcgaaaaagagccttacggcaaacacatcattgtttctgatattgaacaccctgcggtaaaagaatctgccaaatggctttcagagcatggtttcgaggtatcttatgcaccagtaaatgatcaagggtttgtggatgttgaagctcttgctggattattgcgctctgacacgatcttggtttcggttatggcagtcaataatgaaattggatcaattcaacctattcaagccatctcagatctcttggctaatgagcctaccatatctttccatgtggatgctgttcaggctattgggaagattccagtatcgtcctatttaactgatcgtgtagattttgcgacattttctggtcacaagtttcatgctgttcgtggtgtcggttttgtctacaaaaaggcagggaaaaagattacgccactcttaaccggtggtggtcaagaaaaagattttcgttcaacaactgaaaatgttgccggcattgcgagtatggccaaggccttgcgcttggtaactgacaaagaggaattttctcttcctaaaattgccaagatgaaaaagattatctttgacgaattggctaagtacgaggatattactattttctcaggtgagggtgaagactttgctcccaatattttaacctttggaatcaagggtgttcgaggtgaagttattgtccatgcttttgaagagcatcaaatctatatttcaacgacatcagcatgttcatctaaggcgggtaaaccagcgggaacccttatttctatgggtgtaccgactaagttagctcaaacagctgttcgtatcagtcttgatgatgacaatgatatgggacaggtggaacagttcctcacgattttcaagcaggtctacgccaagacacaaaaagtgagatagcaagatttaatcgattaaacaataaaactaaattcacatttaaaaggaaaaggaatgacactaacatattcagaaattatggttcgctatggtgaattgtctactaagggcaagaaccgtatgcgatttatcaataaacttagaaataatattaaagatgtcctatccatctatccagaagttaaagtgacttttgatcgagaccgtggacatatctacctcaatggtacagaatacgagctagtagcagagtctttgaagcaaatttttggtattcaagcctttagtcctgtttacaagtttgaaaaagatgtcgaggtcttgaaaaaagctgttcaagacattatgactggactctatcgtgacggtcttacttttaaagtaactgctaaacgtagtgaccatgactttgttctcgacagtcgtgagctcaatcttactttaggaaatgcagtttttgatgtattgcctgacattaaggctcagatgaagggaccagatgtcaacctcaaggtagaaattcgtgccgaggcggcttatatttctcacgaggaaatcaaaggagcaggcggtctacctgtaggtactgctggtaaaggaatgctcatgctttcaggtgggattgattcgccagtggcaggttatcttgcccttaaacgtggtgtggatattgaagctgtccactttgcaagtcctccttacactagtcctggagctcttaaaaaggctcaagatttgacccgtaagttgactaaatttggtggtaatattcagttcatcgaagtaccatttactgaaattcaagaagaaatcaaagaaaaagcaccagaagcttatttgatgaccttgacacgtcgctttatgatgcgtattactgaccgtattcgtgaagaacgccgaggccttgtgattatcaatggtgaaagtcttggtcaggttgctagtcagactatggagtctatgcaggcgattaatgctgttacatgtacgccagtgattcgcccggttgtcactatggacaagttggaaatcattgatttggcacaaaaaattgatacctttgacatttccatccaaccttttgaggattgctgtactatctttgcacctgaccgtccaaaaactaatccaaaaatcaaaaatgtcgaacaatatgaacgtcgtatggatgttgacgccttggttgaacgtgcggttgcaggaatcatggtaactgaaatcacacctattgaagaggcgcaagacgaagtggatacacttattgaagacttgctctaatctaggaggctatagtactaacatagtagtgcctaggtgctactagagtaaggtatgtcgaaaaagaaatgtcgatgttgaacttttacccagaaaggaaaatacatgactgtttataacatcaatttaggaatcggttgggcatcaagtggtgttgagtacgcccaggcctatcgttctacaattttcaaaaacacaggtattaaggccaaatttgtctttatggatatgttcttgcaggacaatctttctgatttgacccgtaacatggggtttgcggatgaagacatcatctggctctacagctattttacagacctaaaaattgctccaacgacctatactgtcaaggatttggaaaaggaaattccttatgacatcacgcgtcgtgagattaatggtaaagtggttaagcttttttgtgccaaggaagatatcttctatgcagcctacttgcgtaaagaaggtgaagatattgttcaccgtgtggaaaaagtatcgcgtggttgcttaatccgtaaagatttttactcttacactaagatgttcacggagtactacacaccggtagacaataaggctcacctctatcaacgccgtttcttcaatgaggatggcagtgttgcttatgatgaaattgttgatggtaaggatagtgtcttccgttttccagataagattttgtcatctaagcatgaatttatcgcttacttcatgtcgcaacttggtctaactgaccaagatatcgtcatcttggaccgtgcaactggtaccggacaggctgttttccgtaacaccaaacctgctaagcttggggttgtggttcatgcagagcactttagtgaaaatgctgtgacagacaagactattttatggaataacttctacgagtaccaattcagcaatgcagataaggttgatttctttatcacagcgacagaacgtcaacgtagcattatgctagatcagttcaataaatacacaccatttacacctcatatcgtaaccatccctgtgggaagtgtggataaactgagaaagcctgaaggagagcgtaaaccattctcaatcatcacagcctcacgtttggccaatgaaaaacacgtggactggttggccaaggctgtcgttaaggctaaagaaagtctgccacaagtaaactttgatatctatggaacaggtgctgaagaagccaaacttaaggccattatcgaggaaaatcaagctcaggattatatccacctcaagggtcaccaagacttaacagaagtctacaaggactacgaactttacctatcaggttctaagagtgaagggtttggcttgacacttctagaagctgtgggatctggtctaggtatgattggttttgatgttcgttatgggaaccaaacctttatcaaggataatgagaatgggtacctcattcctcgttttgaaaaagatgatgagcctgctatcgtagctgccttggcagagaaaattgtagctttcttcaatcgctcagatttggagcatgttcatcaagtttcttatgatatcgccaaaggctttttgacagaggaaatcgagcagaagtggcttaacttagtaaaggagatgactagtcatgattaatttatttgaaaactatagtcagggtagttgggatctccattactcactgattgtcgctggctatgtaaatacaacagtttgtctttcagatgatggctttctgcctagtgatgtgacctcaccttacctttatttcactggttttgacaaggttcaaggttctgcactttactttaatcaggtccctgtgcctgactactgggaaattataggaacaaatagcaatgcggaaatcttccgttttgataagaaacgtggtcatattcattatgcccatcctgctcaccaacgtttagttaaagcagtggactggtatgatgagtcaggacgcttgcgcgtgactgatcgctacaataacaagggttaccgattctcacaaacaacctataatgttaagcaagaagcgaccattacgagctatttcactcctgacaacaaggaagttatcgtcatcaatcatttgactaaagacgttatcttgaattggaaagacagggtctacattttcaaaaataaatctgaatttgtagtcttctatcttaaagaagctggttatgatttgagtcgtattctatacaactcactggcgacacctttcttgacaactatgaatcttccaaattctggtcaagacgttctcttctggcaagagcctatcactgattcagttcctgggaatatgcgtctgcttcttgagagcaaccatcgtcagactaagattgttgtacaagattacacagcttatacgaatcttctaaagttggttagtccagagcaagcttctcgcgtggccttccttggcttcatgtatccatttgcccgtcagaacaacttccaaaatcaagcgcttatcttgaccaattcagatcagattgaacatttggaaagtattgtcagtgaagtgcctaccatgcattatcatgttggggccattacagaaatgtcaagtcgcttgatggatttggctaaatatagtaatattagcctctaccctaatattacaacagagcaggttaagcgtctttataaggaagctgatttctacttggatattaaccatcaaaatgaaatcttgtcagcgacacgtgctgcctttgaaaacaacttgcttatccttgcctttacgaacactagccatggtcctgaatataccgcaccaagtaatatcttctcaccaatgaatgctgggcaatttaagcaaacacttaaagaagccttgggcaaccgtgacttccttaatcacttgcttgatcgtcaacgtgagcatgctcatgtagcaacaccagaagattataagaaggttattggttaggaaaatgacattagaggttcgtaacatttatcctctgacaccaacatttaagaaggtcgcttcgctttatgaagcggcttttcctgtggaggagcgtctcccactatggcaattatcttggaacagcttgaaaagaggacaatctttcttggcctattttgatcaagaagtcttcgttggcttgacatataccatttatactgacaacctggtctacctactttttcttgcagttgaagaaagtaaacaatctcagggatatggcagtcagattttggcacaagttagggaagaagcaggagaacgaccgtgtgtgcttacgattgagcctatggatgaagaggatgcatctaaccgtactcaacgtctaaaacgtttagcattttatgaacgaaatggctatcaggcattgaatcacttctatttcgaaggaagtgaacgctatcaaattttgacaacggataagagcatttgtttagctgatttggagcaggatctagctaagaccttcttaggaaaatatggtataagggttgagtaggggaatcattacttggttaaaggtcaatgagcagaataagaataatcaaaataactttttctcttgtcattagaggaaaaaaatgatagaattgtaacgttgactaaatgcacgtcctgtgcaaccgcacgactactgttcgcaagtgggttcgtccccgcagtactaggcgagtcttcacagagggaaacctcagacacattaaaaattttaataggaggtgcatcatgagcacatacgcaatcatcaaaactggtggaaaacaagttaaagttgaagtaggtcaagcaatctacgttgaaaaaatcaacgctgaagcaggatcagaagtaacttttaacgaagttgttcttgtcggtggtgataaaactgtagtaggtactccagttgttgagggagctactgttgtcggaactatcgaaaaacaaggtaaacaaaagaaagttgttactttcaaatacaaacctaaaaaaggtagccaccgtaaacaaggtcaccgtcaaccttatacaaaagttgttatcaacgctatcaatgcgtaagttagcgactaatcactaagaaaggacacaatcttatgttgaaaactcttgaaaacttgcaacttttcgcccacaaaaaaggtgggggttctacttccaatggtcgtgattcacaagctaaacgtcttggtgctaaagcagctgatggacaaactgtatcaggtggatcaatcctttaccgtcaacgtggtacacacatctacccaggtgtaaacgtaggccgtggtggtgacgatacactcttcgctaaagttgaaggtgttgtacgtttcgaacgtaaaggtcgcgacaaaaaacaagtatctgtatacccagttgctaaataattaagctaaagtctgcacttttgtgtaggcttttctttataaaaaaaggagaatcctatgcctttaaatcactaccaacaagaagtggggccaagtctcgcggatgctagtccggggaagatgccagatgttgccctattagaaggccgttattgcagcgttgaacatttgacggtggcagagcattatgaggacattttagacttttactttactaatcagattctttctgattggacctatatgtatgcggatccttttgaatctgaagaagctgtccgtcagtgtttggaggattatgagcaatcccagaatccttatttctttgccatcagagataaggattcaggtaaggttctaggaaccttttcactcatggctattacaccgaaaaatcgcagtgttgagatggggcgagtgattttggcacctgccttacaaaagactcgagcagccacagaagctcaatacctgcttatgaaatatgtctttgaagatcttaactatcgtcgttatgagtggaaatgtgatagtctcaaccgcccttctgccaatgcagccatgcgtttagggttcacctatgaggggcgttttcgtaaccatgctatctataagggacgtagccgtgatacggactggttctcgattattgacagtgagtggccagtacttaagaaacgatttgagaattggttgtctcctgagaattttgatgaacagagacagcagaaacgttctttgagggactgttagctgtcaatgtaaggctcttttctgatgaaggagccttattttagtgttcttagacctaaatcaaagctcctacttttctagtgattattattactgtcaaactcagtctaaatactcatttttctgtcaataatattcccataataaagcatatttatgctataataaagagtaattgtatcaaggagaatatgactaatggatttaattcgcgaaaaagtatttgttaaccgttaccactatgatgttcgtaaccatgagtgggaaaaagaaaatggtgtgcctaaaacaaatgttgaagtaactttccagttgcacaataaagatgaagaagctaacaatacgtctgttgtagctgttttgcaatttatgattgtccgtgatgagtttgttatctcagggattgtttctcaaatggaccatattcaaaaccgtatcgtcaatgaaccaaaagacttctcacaagaagaagcagaagccttggctgcaccgctcttggatacgcttcaacgtttgacttatgaagtaactgaaattgccttggatcgcccaggtatcaacttggagttctaagatgtctcttgcagttattacggattcatcggttaatctccctgctgagattcagggccatgctgatgtttatgttttagatattccagtcatcattgaggggcagccttttgttgaaggaaaaaacttggatgtcaatcagttttatgaacaaatggcaaactctgaggaactgctcaagacatcacaaccaaatctagctgacttggataacttgcttatggagttggaggcggaaggttatacccatgtcattgggcttttcctttcttcaggaatctctggtttttgggccaatagtcagtttttgattgaggaccatgccaagttgaagattgcttttcctgatacaaaaatcacagcagctcctatgggagctatggtgagaaatgttttgcattggtcagcccaaggaatgtcttttgagaacattttgaagaagcttgaggagcaagttgaccaaacgacggcctatattcttgtggatgatcttaatcatctggttaagggtggtcgtttgtcgaatggttcggcgattttaggaaatcttttgtctatcaaacctattttgaattttaatgacgaaggaaaaatcgttgtttttgaaaaggtgcgtacagagaagaaagctgtgaaacgtttggttgccctagctgaggaaaatcgtgaaatggagcttagtatccttcacactaatgctcctgaaaaagctgaggaatttaaaagacagctagaagcacagggaattagcgtttcaacagtggtatccttatgtgccgtaattgcgacacacttgggtgaaggagcactagtgttaggtctaacacctaaatttaccaaataagtactatccatgtgggatgggcttgtctatgattaaaatcaatagagaggaaaaatgacatgtctattaaagttattgttgctggatttaaaggaagaatgggttcaactgcggttgagatggtcaagggagatgacgaattgactttggctgccttgcttgacccatttgcgacagaaaaagaagtggacggtattcctgtcttcacagataaagcggatttggttggctttgatgcagatgtctgggtggatttcactatgcctgctgttgcctatgaaaatactcgttttgctttggagaatggttttgcaccagttgtgggtacaacaggatttactgaagcacaaattcaggaattaacagacctttctaaagacaagtctattggtggtttgattgcgcctaactttgctattggtgctatccttcttatgaagtttgcggcagaagccagcaaatatttcccagatcttgaaatcattgagcttcaccatgacaagaaaaaggatgcgccttcaggtacagcagtgaaaacagctgaacttattcgtgaggttcgcgaaacgaaacgtcaaggtgctgaggatgaggtggaaacacttgctggagcacgtggtgcagagtttgatggtttccgtattcacagtgtacgtttgccaggacttgtggctcaccaagaggttatctttggtgctcaaggagaaggtttgaccttgcgtcatgattcttatgaccgtatatcctttatgggtggggttaacctcggtattaaagaagtggttaaacgtgatcagcttgtttatggtttggaacatttactatgagattaagttatttgccttctgagtttcagaaggctttaccaatattagagaagattaaggctgcgggttttgaggcttactttgttggtggttcggtacgagatgcccttcttaaccgccccattcatgatgtagatattgcttcgtcttcatatcctgaagagaccaagcagattttcgagcgtacggtggatatcggtattgagcatgggaccgttttggtcttggaaaatggcggtgagtatgaagtgacgaccttccgaacagaggacgtctatgtagattaccgtcgtccgtctagcgtgtcctttgtgcgttcattggaagaagatcttaagcgtcgtgattttacagtcaatgcttttgctcttaatgaaaatgctgaggttatcgacaagttcaatggtctagctgatttggacaaccgtgtcttaagggctgttggtaaggctgaggaacgctttaacgaggatgcccttcgtatcatgcgaggactacgttttgccgcgagcttagactttgatatcgaagaaaagacttttcaggctatgaccagccatgccccacttctggaaaagatctcgattgagcgaagtttcatcgagttcgataagttgcttttggccccacattggaaaaagggaatcaaggcacttctagcgactaaggcttatcagtaccttccggattttcaagaaactgctgaagaatggcagtcttttgtggcagactatgtggaggactttagatttacaagttctgaacaggcttgggcggcaactcttttggctctcaagcatgataatccacgctctttcctaaaaaaatggaagacatctgttaatttccaaaagacagttcagtccctggttgacattttcaatttccgtttggagagagctgtgactaagcaagatgtttatcagtttggtaaggaactcttagaggaggctgaaaccttgagacgggctcagggcttggacgtcgattatgagcgtattgccgagttggatggtcagttgctcatccatgataagcacgaaatcgttgtgaatggtggcacactgatgaaggagctaggattcaaacctggtccggaccttggtcatgcacttaaggctatcgaaaatgccatcgttgatggtcaactagctaatgccgaggaagccatcatggcctttgttcaagctatgaaataagtctagagacgtgataaaaatgacacaccgctacagagcatgcgtaggatccgtagcggtgttatttgtaagaaggaagtaagatgtcagattttattgttgaaaaattaaccaagtccgttggagataagacggtttttaaagagatttcattcattatccatgatttggatcgtattgggattattggtgtcaatgggacaggtaagacaaccttgctagatgttgtgtctgagcgtattggttttgatggtgatgtgtcacctttcaccaaggctaatggttataagattgcttatttgactcaggagccagaatttgatgatagcaagacggttcttgaaactgtcttgtcatcagaccttcgtgagatggctttgattcgagaatatgaaacccttatggcagaatattctgaggagaatcaggctcgcttggagaaggttatggcagagatggatagtctagatgcttggtccattgagagcgaggttaagacagtcttgtctaagttgggattgtcagacctctcgcaaaaggtcggggacctctcaggtggtcttcgtcgccgtgtgcagttggctcaggttctcttgaatgatgcagatctcttgctcttggatgagccaactaaccatttggatattgatactattgcttggttgactaattttctcaagtcttctaaaaaaacggtcctctttattacccacgaccgttatttcttggacaatgtggccacacgtatctttgagctagaccaggctaatctgattgaataccagggaaattatcaagactatgtgcgtctaaaggctgaacaagatgaacgagatgcagcagctcttcacaagaaaaagcaactctataagcaggagttggcatggatgcgaacgcaaccacaggcacgtgcgaccaagcaacaagctcgtatcaatcgttttaaggagcttaagggtgaggttcaccaaacggttaataatgacgatcttgaaattaactttgagactagccgtattggtaagaaagtagtgaacttcgagcatgttgattttgcttatgaagatggcaagcaaattctcagtgatttcaatcttatcatgcaaaatcgtgatcgtatcggtattgttggggataatggtgtcgggaaatcgaccttgctcaatctgattaatggtgaccttgtgcctacagctggtgttctggatattggtgagacggtacgtattggttatttctcgcagcaaattaaggacatggatgagagcaagcgtgtcattaactacttgcaagaagttgcagatgaggttaagacaacggttggaacaactagtatcacagagctcttagagcaattccttttccctcgttctactcatgggacacagatttctaagctctctggtggggaaaagaaacgtctttatctacttaagattctgattgaaaagcctaatattctgctcttggatgagccgacaaatgatttggacattgcaactttgacggttttggaaaacttccttaatggttttggtggccctgtcgttaccgtaagtcacgaccgctatttcttggacaaggtggctaacaagattctagcctttgaagagggtggtgtgcgagagttctttggtaactacactgactaccttgatgaaaaagccttcttccaagagcaagcagccctcttagagaaggaaaaagagcaagctagcgttaaagttgagaaagtcaaagaagacaaaaaacgcatgagctactttgaaaaacaagagtgggcgaccatagaggatgagattgctgaccttgaagccaaaatcgaagagattgaagcagccatgcttgaaaatgctagcgattatggacagttagcctccctccaacgagacttggatgctgctaacgaaaccttgcttgaaaagtatgaacgctatgagtatttgagtgagctagaaggataagctctttagtaatcaaagtatgacaaaagccctgcagatgtgaactgcaaggctttttatgtttatgtagtgactgctttcttcctaccacaagcggaacgaaaaggagaggacagagacccccgcgaagataattaaggaagctaccaagcgcccaataagaaaggctgagaaaaacggagcactaaagagcaggagtccaaagactagacaaatcaaggtgattgatagggcaggttgacctgagaagccgaattgacgttggcgataagcttgaaagccttgcgtaaatgctgagacaagaagccaccaagcgataatggttacagctacgcccgagagtacccatgctgatgttgatagcaggataataccaaaaacgatggaaatgatactctgaagcagttggaagaaggagcggttttcgttatctcgtttaaaataaaccatgagacttgaaacaccagataccagcatcactagggcaaatagccaaccaacgatggcaagaagatttgtaggattagcgaagaaaaagacacccaagagtgtaatgagaattccactaatcaatgtaaaacttttcataggatacctcttattaattttcttaatactactatgtaagtatcaaattgtcaaacaaagaccttactttagagtggcttgatatgatatgtgtaggtggcagcctttctggttctagtagctacctgacgacctgttttttggaagaggtgtttaaagcgacgcaagaaatttgtggaatccatcttgaggtagtcttcattgaaggtaccaaaaagttggcggtaggtggtcaaggtgttttcctcgggcataatggaaaggatagttggatagtattcgagtcgtcccttgatacgttccatagctgttaagagaatttcccaatggtcaaaggcaaggtcatcatgtgacagcgtcttatcaccatcaacaagttgcagttgaccgtctatcatggcaatgtctaaccaatgcgtagacgctgcatcgtcggcagccttttccacttgaatgtcattgaaggtcatgaagcagaggtaagccactgtaatggtccacattcgaggatcccgatatggtgttcccacagtaatgagttgctcaatatgatcaggattgagtgtaatggatgtttcctcctgtacttcgcgacagacagctagattgagatcttcttgctcctgaacgaagccaccactgaaggcgtatttccccatgaagggatggttttttcgcttgataagtaaggtttggactcttccttcataatagcggaagatgaccgagtcaacggtcactgagggcttaacgtacttatccatttcctctcgctgatagatgtccaaaaattccttttcgctaccagagttttcgaaggttctagtcatatgtttcctccatgtttgtattgtaagttttaagtgatgattacgttggattggtcttttaaatctcgatgtgtagacgttctttgattgcttttttggcattgtggtagttgtccgcaaagaagctgtcactattactatttttccctaaaataatgattttatccttgaatggtgataggaggtctaagagatgcttggtaaaccagtcacgtgtttggctatcagccatagtcatgtcacggaagccatcatccacatagtttgattttggcagaattacaaaaatcaaatcccatttttcacgagcttgagttacctgatagagccgatccagcatatcaaattcttctttagaaatattttctttcaaatagtagtcgatataaacttttgtgactgttgagttggtatcggcaaagataagtcctgagtgctgccctttatcaatgatatcagaggtctgggcatattgatctgtcaggaggtgaatataatcgttagtatctaactcgtcatctcgtacattatacttttcttgatactccctagcatattcaagagagcagggagcgttgtaagttcgagccaaatctttaacaagagtagtttttccaccgctagcagagcccacgacaaggaccttacgagtaaagtgacgacggaaaggcttggtgataaaacgccaattttccataggattgtcgcgaatctcggtggcagagatgttgataatagagcgttcgatgagttctacctgagcttgaggataatagcgattgagctcggtcacgtactctggctctccaacatagaaggtaatcttttcaggattatccgtatttttagagataagctctttgacacgattaacccaaggtacccatccctcgggataggctggcatcccagcctcatccagtttatccacaacgactaattcatcatcatagaaaacttctcgaacataacggaaacggcggttgagtgataggcctgcgcgtgtcccccgatcttcttgtgtgttgctgccacttacgatgacgagcacattgtcattagcgcgttttgccttggtaataaggtcaacgtgcccaacatgcattggagcgaaagttccaaaaacaatgccgatgtgctttcctgataattgctttcttttcataaaaaatgatccttttcaagatttagtaaaattactaaattcataataacatagttggagatctttgtaaatgtaaaaatagtaaatttactaaattgtttttaggctattttagctttaaagttgaaaaaaagtttaaaaaattttggagaaaaactagaaaaatagaatccgtttacattgttgaattgacaactttttaggagtagcttaaaaaaagatagatcacttgctatgtcataaaagctaacataaaaatcaaaaaaatagcagaaaatacttgacaagaagattctgaaaatttatactattcatgtaattaaattactaaggtaattatttgaaaggaaacattgatatgacaacaggtaaagagtacgttgctagcgtttttgaaaaagtgaaagctcaaaatggccatgaggctgagttccttcaagcagttgaagaagttttcgattcacttgttcctgtcttcgataaatatcctaaatatattgaagaaaaccttttggaacgtttggttgaaccagaacgtatcgtttcattccgtgtgccatgggttgacgataaaggacaagtacaagtaaaccgtggtttccgtgtacaattctcatcagctattggtccttacaaaggtggtcttcgtttccacccatcagtaaaccaatcaatcattaaattccttggtttcgaacaaatctttaaaaactcattgactggtcaaccaatcggtggtggtaaaggtggatcaaacttcgatcctaaaggtaaatcagataacgaaatcatgcgtttctgccaaagcttcatgactgaattgagcaaacacattggtgcagatacagacgtacctgcaggtgatatcggtgttggtggacgtgaaattggttacctctatggccaatacaaacgtcttcgtaatgagtacacaggtgttcttactggtaaaggtttgaactggggtggatcacttgctcgtacagaagcaacaggttacggtgctgtttactttgcagaacaaatgcttaatgcacgtggtgaaaactttaacggtaaaacagcagttgtttcaggtgctggtaacgttgccatctacgctattgaaaaattgcaaagcctaggtgctaaagctgtaacatgttctgactcatctggttttgtttatgatccagatggaatcgacgttgacttgttgaaagaaatcaaagaagttaaacgtgaacgtatcgttaaatatgcagaagctcgtccaaatgcaaccttcacacctgctggtggtgaaaagacagtttggtcagttaaagctgacttggcattcccatgtgcaactcaaaatgaattggatgaaacagatgcagaaacacttgtagcaaatggtgtattggctgtttcagaaggtgctaacatgccttcaactttgggagctattgatgtcttccttaaagctggtgtatcatttggtcctgccaaagctgctaacgctggtggtgttgctgtatcagctcttgaaatggcacaaaacagcggacgtacacaatggacattcgaagaagttgatgctaaactttacgatatcatgaaaggtatctacgaaaatgctgcagcagctgctaaagaatttggtcatgaaggtaaccttgttgtgggtgccaacatcgctggattccttaaagttgcagacgctatgtcagctcaaggtattgtttaattaacagccttgacctgattaataagcctctcgataaaacaaaaaaagaagcctgcgggtttctttttttgtttagacagacttaggaggaagaggagttccgtgattttttggtataataccttgtaagaaatctctttctagagcagatttttatgaattagaatacgagaggaataattttgagtgttggaaaggatccctgtggggtaaaaaagaagaagtatactaatcagacaatcattctaataagtttcttaatcagtatggtgtcaatactgcctatgttcttttttagggacaagctttatggtgatgatattgtctttcacattaaccgactcttatctttggatactgtctggaagagtcctatcaattttacgactaacggagggaccggacaattaatcaataccttttatccctggttaacttattatcctattttcataatctataagctgactcagtcggtctttgtagcctggatgagttttcagtttcttgttcgctttgtaacttgtttgcttagtttttacggattacgtttattgaaatattctgataaacaggtgatgatattttctaccttttatctcttttcggggtatttcttgcacaattcttattaccgggcagccgttggcgaaacgctagcgatgatttttctacctctagttttcgttggcgttcgtttgataacttttggagattacaagaaatggtggatcttgactcttgggatgcttggtttagtttattcccatgtcttatcggtccttttggcttctgttgggattttctttgcggtggtaactagtttttggatttgggataataaaaaagaacgtgtcctaggttttcttaaggccacccttgtcactcttagtatgtctctagctttctttgttcctatgatagagcaattcaagtatgtcactctacgaacgacttttaaaccgctcctatcaaagactgctttaagtctggcagacaactgggagttgattctaaaaagtgatttaaggactccatcagttaatcttctctacctcctgggcctagtgctaagcctgatttttactaagcgttttgttaaggttagggaagctagaatttacctttttatttctcttattttagcttttttaaccttgaaaagttttccttggcagttcttacagtcaagtccagtgtccaaccttcaatttccttggagattatggagttttgctctgcttttcttcagtttagctttggcgaatatcttagaaaatatttctataaaggcatcgacaatacttgtcttgttaggtctttgtctaaatatgtttcagattgttactgttcaagataagatgactgaagcaaagaatatattgccaagtcatacaaaagtcacgagagaaatgctggccaagggaacttataaaaatataaatggggattataccaataaagaagtgccttttggctttgtctttgacaaacacctcttcttggataatcaggaaatcaagccattcatcagccgttctcccaacgagctagcacttacggtgaccaacgagtctaaagaatctaaggtcttgtcgttgccagttttctactacaaaggacaagaagcaaggattgatgggaagcgagtaaccacttacttagctaaggaaaagaatccaactaatctagtcttaccaccaggtaaacatggtgttgttttgacctatagctatactacagttgctaaagtggcaatgagtgtttcaactattagtcttttggtttttattggttatttgtatagagtgaagaaagatgactaaaaaggagcctgcgggtttctttttttgtctgttttactagagggtgggccttttgatataataggtcaaggtgatttatttggaatgaagacctttggttccgataaaagaaggatatattatttcatagtttagataagaaaagggagtaaatagatgataaaaactatcgtaaaggatgtctttttccttggacaaaaatcgacagaagcgactaaagaagacctctatttggctaaagatttgcgtgatacattggagtttcataaggatgcctgtgtgggtatggctgccaatatgattggagttaaaaagcgtgtcattatcgtaaatattggttttgttaatctagtcatgtttaatcctgttttagtcagcaaatcctcaccttttcaaacagaggagtcttgtttatctttagaaggaagtcgtccaaccagacgttatgagtcgattgaggtagcttatttagatgaacaatggatgcctaaacagttaaatttttctggcatgccagctcaaattattcaacatgagttggaccatttggagggtattattatttagatagcctagctcaagcgttgttaggttttagagtccaaagccttaataatcacagttacgggagtgagagtggaaagcaatattctttttcactcttttttagttctcataagaacttttcttcttgacaatagttctcataagaactaaaatagtttccatgagaattatttaaggaggaacttgcgatgcatggaaaagatccttttaatgaaatcaaaaaattcatcaataccatggaatctagagtgcaagagctaggcaaagcttacggcgttgagcatttagctggtccacaagggtttgccgtcaggtacttgtttgagaaccaagataaagaaatctttatcaaagatatcgagaaaaggctatctatatctaaatcagtggctagtaatttggtcaaacgtatggagaaaaacggtttcgttgaattggtgacatcggacaaggacaaacgttacaagtatgttcatctgacagacttgggtaaaaagaaggcccaagatgttggacatttccgagaggctatccatgaacagctattagaaggcatttcgaaagaggatgctgaaacagcttttcgggtctttcaccaaattcgtaagaatttagaaaaaaataaggagtaacttatgtttaaaatttttaaacgtttgacagcaaaagagttaagcatgattatcttagctgtgatatttgtttgtttgaacgtctatctaaacttgaaaattccagactatatgtctgacattacgaccctcttatcaaccaaggggactaaggcgtcggatatttttgcctggaatacagatgccccagggatgcgaatgcttttaatgtcctttgcgggctttatggcctcagtagtggttggtttcctagctgccagaacagcagcaagttttacaacccgtcttcgtgatgatatcttccatcaagttctagatttttcggatgcagagattaagcaattctccattcctagtcttttgacccgcacgacaaatgatattacccaattacagatggtactgaccatgggactacaggtcattacacaggggcctattatggccatttgggcgattacaaagattgccgataaaaatggaaattggctccttgccttgcttgtcgctgtggcagtgattgccgttctcatgctcttcctcttaattatggttatgcctaagcaacgcttgattcaaactctgaccgataaactgaatagcgtaacgcgtgaatctcttacaggaattcgtgtggtgcgtgcctacaatgccgaaagttatcaagaggataaatttgaaaaggccaatactgatttgacccaaaacaacctctttatcggtcgttcttttgccttactaacaccggtaatgactgctgtatccagcggtttgacactggctatttattggattggtgcgcatctgattgaagatgttaagattccaacagatccaacgaaaattgctggtgccatggaagacaaggtccatctcttctcagatatggttgtctattcgtcttatgccatgcaggttgttatgggattcatgatgatgattgtcgttttcttccttcttccacgtgccgttgtagcagctggccgtatcaatgaagttctagatacacaatcttcagtctcttaccctgaaaatagttctgaaaaacctaaagacgtgggcactgtcgaattcgatgatgtttccttccgttattctgaaacttcagagcctgttttggagcatgttagcttcaaagctaaaaagggtgacacggttgcctttattggttcgactggatctggtaaatcaacgcttgtcaatcttatcccacgattttatgatgccacgcaaggaactatcaaggttgacggtgtggatgtacgacattatgaccacgaaaccttgcacaatatagtcggttatattccacaaaaggctgtgcttttctcaggtaatatcacgtcaaatatgacaatgggaacgagcaataatagtcctctagatgacgctaagatttgggaagctctcgaattggctcaaggaaaagactttgttgaaaataaagaaggccaacttaaggcagaagtggctcaagcggggtctaacttctcaggtggtcagaagcaacgtttggctattgcgcgtgcacttgcccgtaagcctgaaatcttgatttttgacgattccttctcagctttggactataagaccgatcgtaaactgcgtcaagaattgtctgaaaaaacacaagatatgaccaagttgattgttgctcaacgtatctctactattatggatgcggaccaaatcttggtacttgatcaaggtaaagtagtcgggcaaggaacccacaaggaactcttggcaaataatgaggtttaccaagaaattgcctattcacaattgtctaaggaggagttagaaaatggaaaataagtcaaaaacatcatcctataaacgcttaaaaccctatattaaaggtttccaaattccgtttgtccttgcgatttttggagcaattatttcagcggtcattacagttattggaccagataaacttaaagaaattaccaatactattactgaaggtatcacacctacaaaaatggggacgattccaggtattgatttggacaaggtagcaagtattgctatgaccttggctgttctctatgccatttcagcgattgtgggttacttacaaagctttaccgttgcgacggttacacaacgcttttcacaacgtttccgtacagctatccaaaagaaaatcaacagtgttcctcttgattattttgatagtcactctcaaggggataccctctctcgtgtgaccaatgacgttgaccttttgggacaatcgcttagccaaggcttaggtaccttgattacttcaagtgttctcttggtggcagccattattatgatgttctactcaaatgtcactatggctttcactgcgattggttctgtcttgataggatttgttttggtagccttcatcatgggcttctcgcaaccacttttcaagcgccaacaagaaaatttggctaatattaatggttatattgaagaaatctacacgggtcaagcagttgtaacgagttacaatgccgctcaagaaagtagtcaagctttcaaggggcttaatgataaactctataaatcgatgtggcaatcacagtttatctcaggtattatgatgccactcatgattttcattgggaactttggttatgtcatggtctgtcttgtgggtgctatcaaagttattgatggtagcttgactattggagatgtggtagccttcatgacctatgttcgtatcttctcccaacctctttctcaaattgcacaagggattacacaactccaatcagccactgcagccattggtcgtatctttgaatttttggaagaaaaagatatggacgacgagtcagctaagacagctgaattgacagatactaaaggtcaagttgtctttgatcatgtttcctttggttatactcctgaaaagactattattcatgacttttcggctcttgctaagccaggtcaaaagattgcgatcgttggtccgacgggtgctggtaagacgactattgttaacctgcttatgaagttctataacatcgaccaaggtcgtattaccattgacggtgtggatacgaatgacatgaagcgtgaaactgttcatgaccaattctcaatggtgcttcaagacacttggctctttgaaggtactattcgtgataatttgatttacaaccaagagaatatttctgatgagcaagttattgctgcagccaaggccgtcggtgttcaccacttcattaccacacttccaaagggttatgatacttatttggatgattctgtgaccttatcagttggacagaagcagctcttgaccattgcacgtgcgctgcttaaggatgcccctctccttatcttggatgaggcgacatcatctgtcgacactcgaacagaagaattgattcaaaaagccatggacaagcttatggaaggtcgtacttgctttgttattgcccaccgcttatcaaccattcgaaatgctgaccttatccttgtgatgaaagatggtaacattattgaacagggcaatcatgatgagctcatggcagcagatggtttctatgctgatctttataatagtcaatttacagaagaagttgcctaaacttttcttataaaattataagattttacaaaaaaacatagaacgtatgactgtcagtcatacgttttgtgttatactgaaaaaaacagacagattaggagattatgatgcaatatcgcaaagcaagactagacgaagttcaggaagttgcacaagtatgtgcagatgcctttgaagattacccctatctttcaatgattgccagtaatttaaagaagcctgaacagtataaggaatttgtcttagccttgcaggaaatattggtgcgtttggcgattaaacaggactcatgtttggtggctgaaaaggacggtcgcattgttgcggcggccattttacagcatcagacgatttctatgcttaactatcttcagaacggagcgaccaagcttttccgttttataagtatcaccaagttgttcaagtattttaactttgttgaagagtccgaaagacatctggaagattctgcagaatacgactggtacttgatgatgttggcggtgactccagattatcaaagaaaagggatagggagtcgtttcttgcttgaaggggttgaaccttttgtgcgtagtacaggaggtcacagtcttggtttgattaccaatcgcgattacaatgtacctttctatgagaaaaatggctacaagcaatgtggttataaggctttgacttatgaaacacacaaactaggtaactggccttttgtcaaatcgcttgatgaatagccttgtgctatttaattaagataagcaaaatgaatctggcttcggctggatttttttcttagccttagagtccttcttgtctggctcattccttatttttaagcctaactatgctataattaggaaacgctattagaggaggtttatatgtcaactccaagtatttatggggaatatgctcagtatctccccaagattctacaagaaataacagacccgattattgcggctaatataactagcaaaaaagaaacaggctttaaactctatgaacattttatttcacgaatcaaagaaagcgattctatgcgtgaaaagtgtcgtaggaaaaatttacctgaaaccagccaatctgctctcaaggaaattcgtgacagtattgggattcgaatcgtttgtggctttgtcgatgatatttacaaaactattgatgttatcaaggctatccctggcgtttctatctataacgagaaagattacattttaaatgctaagcccaatggctatcgttcttatcacctcattttggaaatcgaaaccgagtttccagatgtgctaggaaatgagagaggaacctattttgtcgaggtccagcttcggaccatcgctcaggattcctgggccagtttggagcatcagatgaagtacaagcacgatatcaagaatccagaaatgattactcgtgagcttaagcgctgtgcggatgaattagcttcatgtgatttgaccatgcagaccatccgtaacttaattcaagaaggaggggactagaatggctttgaaaattctactagctgaggatgaagaggctctttctcgagtttacaaggcagcactagagcatcagggttatgaggtggatcaagcattcaatgggcaagaggctgttgatttagctgcacaaaatgcctatcaagtaatgattatggatattatgatgcccattaaaacaggtattgaggccctgaaagagattcgctcctctggggatagaacccacgtcattatgttgacagctatggctgaaattgatgatcgcgtgactgggcttgatgctggggcagacgattacttgaccaagcctatttcccttaaggagcttttggcgcgtctgcgctcattagagcgtcgtgtgagtgagagcttcacagccaaaattttgactcttggttctgttcgtttggaccaagaggagcaagagttagttgctgggaattctattcgactttcaagtcgtgagaccaagttattggctcactttatgctcaatcctgctaaaaaactaacgacggaacatctttttaagaccatctgggatgatgaggaagatgtagatgagtcaattgtctgggtctatatttcctatctgcgtcaaaaattgcaagccatccaggctgatattagcattcttggtgagaagggtggcgacttttgcctccgtaccaattagagaggagcagcctatgtttagacgtttgcgacttcaatttattacgattgcttccttggctatcctttttatcttggtctttacggtgggaatcatcaatacggtgaggtcctttcagacagagcaggaaattagtaaggttcttaacacgcttacagaaaataatggtagttttggaaaaacaaaaaaaattgagaccaaccaagggcgtgaaattccatcggatagctttagctttttcagtgtaatcttgtccggtgacgaagtggttagtcaggatgtcagtcatacttctttagtagatgatgaatcagctgctgattacgcccttgcagctagccgtatgtcatctagtattgggacaattagagaaaaaaacatcaatctgagctatcaggttagtaaggttagccaaggtaggattctggtagtctttctagacactacctcttattataattcttctcaagccttgcttagtatttctatcctcttatccatgtttggctttatcttttttgttgtcattgtcagtgccttatcaggaatcgtcattcgtcccttcattcgaaactacgaaaagcagcgacgttttattactaatgctagccatgaattgaagaccccgttagccattatttctgccaatacagagctacaggagcttatgactggagagaatgaatggaccaagtcaacaaatgaccaagtggcacgtttgaccaatctaatcaattctcttgtggctctatcccgtctggaggagcagccggacattgttcttcaagatgtggatttttcctatattactgaggatgctgcagaggactttaaaggtcccgttatccgagacggtaaatcgtttgtcatggatattactccagggattcatgttaaggcagaggagaagtctctctttgaactcgtgaccctgcttgtggataatgctaacaagtattgtgatccagaagggacggttactgtaaggcttcgtcagattggtaggacgcgaaaacgggctcgtctagaagtgtctaatacttataaagaaggcaagtctgttgactatagtaagtttttcgaacgtttttaccgtacagaagaatcccataataataaagaacataagggatttggtattggtctgtctatggcacaaagtatggtaaaattatttaagggacgtctctttgcttcctacaaaaatgataccattacttttacagtcatcttgtaaagatattttttaaatatttgactaggtgaaaaccctaatttatgataaaatagtaaggatgaagatttagtattttctttgcaaaaaagaaatcattttcctaaccgattcgtcaaaggcaaagctcaaatgagcctttacaattcttaagacgatgctaattgatgacttaggaatgataaatctcagttaagaataaaagttgaaaataaaatagttaatagggagaaatcatggcagaaccaaaatacaaacgtgtcctcattaaactttcaggtgaagctttagctggtgaacgaggtgttgggattgatcttccaactgtccaagctatggctaaggaaattgctgaagtagcggattcaggtattcaaattgctttagttattggtggtggtaacctctggcgtggcgaacctgctgctgaagcaggaatggatcgtgttcaagcagactatactggaatgcttggaacaacgatgaacgcccttgttatggctgatagtctgaaacaactcggtgttgatacacgtgttcaaacagcgattgatatgaagtctgtagcggagccttatatccgtggtcgtgcccttcgtcaccttgaaaaaggccgtatcgttatctttgcagcaggtattggttcaccatacttttcaacagatacaacagcggctcttcgtgcagctgagattgaagctgatgctattcttatggctaaaaacggtgttgatggtgtctacaatgacgaccctcgtaaaaacgctgatgccgttaagtttgacgagttgacacacgtggaagttattaaacgtggtttgaaaatcatggatgccacagcttctaccctttcaatggataatgacattgaccttgttgtcttcaatatgaacgaaccaggaaacatcaaacgtgttatctttggtgaacaaattggaacaactgtatctaacaaagcagaatcacacaaataagaaagagagaatttatgacaaacgcaattattgaaaaagcaaaagaacgtttcgcccactcacatgagtcattggcccgtgaatttggatctatccgtgcaggtcgtgccaatgcatcacttcttgaccgcatcactgtagaatactatggtgctccaacaccacttaaccaattggcttcaatcaccgttcctgaagcacgtgtccttttgatttcaccatttgataaaggctcaattgctgatatcgaacgtgctatcaacgaatctgaccttggtattaacccagctaacgacggttctgttgtacgcttggttatcccagcacttacagaagaaacacgtaaagagttggctaaagaagtgaaaaaagtcggcgaaaatgctaaaattgctatccgtaacatccgccgtgatgctatggatgaagctaagaagcaagaaaaagacaaagaaatcacagaagatcaattgaaagctttggaaaaggatatccaaaaagcaactgatgatgctgttaagaagattgacagcatgacagcagaaaaggaaaaagaactccttactgtttaatcaatagaaaaataaggagagtgggacagaagcaaaagagcatggactatgttagcttccttgtccgactctctttttagaggaaaaaagatgaatacattacttggaacaatcattactgcactagtagctgatgaaaatgacaaattttactttgttcaaaaggacggtgtaacttttgccttgtctaaagaagaaggggagcacgctattggtgacatggtgacaggtttcgcctacacagacagcaagcaaaaatcacgtctaacgcaaaaagaaatcaaagccactcgtgattcctatgattggggagaagttactgaagtccgcaaggatttgggtgtttttgtagacgtaggaattccagataaggaaatcgtagtctctttagatgttttacctgaactcaaagagctttggcctaagaaaggtgacaaactctatatcaaactcgatgttgataaaaaggatcgtatttggggacttcctgccgaacctgaggtcttccaacgtatggctggtcctgcttacgataatatgcaaaaccaaaaatggccagccattgcctaccgtctcaaactctcaggaacctttgtttatctaccagagaataacatgcttggtttcatccatccatcagaacgttatgcggagccacgcttaggtcaggtccttgaagcgcgtgtgattgggttcagagaagttgaccgtaccctcaatctttctcttaaaccacgttcttttgaaatgctcgaaaatgattcacagatgattttgacctatttagagagcaatggtggctttatgacacttaatgacaagtcatcaccagcggatatcaaggcaaccttcggcatttctaagggacaatttaagaaagctttaggtggtctgatgaaggcaaaaaaaatcaaacaagatcagtttggaactgaattaatcggttaggagaaggtatgagaaaatccttttatacttggctcatggcccagcgtaatcccaaatcaaatgaaccagtagcaatcttggctgacttggcttttgaagattcaacctttcctaaacatacagatgacttcgaagaagtcagtcgctacctggaagatcaagctagtttctcatttaatcttggtcagtttgatcagatttgggaagactatcttgctcattaatagcgactaagtctaggataagcaaaaagactcttagcattttcttttaaaagcagttaccatttgagctagatgaattgttacaattttttacaaatatctcagctgtttttcaataaattaggcttgttacaactagttagtaattgctttaaagtgcagtaaatcaccccttttttgacaaaaagtgtggtatcattgtagatgttaaaattgttaaaaaaggaatgaattatacatgttatcaaaatctaaaacaacaaaggcacttctttactcgaccgcagcactttcactttttgctgcaagtcacgtacatgccgatgaaacttcaaactgggcagctcgttcagtagatcaaatcaaagcagacatcgctgtaagtgacaaccaacaaacttatacagttcaatacggtgatactttgggaagtatcgctgaagcaatgggtatcgatgtgaatgttttggctaacatcaatcaaatcacaaacattgatttgatttaccctggaacagtcttgacagcaacttacaatgctgataatcaagctgtctctgttaaagttgaagctccagcttcagaaacatcaactacacctgtagttgcagaagctaatttaacaactaacgaagtgactgtaaatggtcaatctgtagttgcagcggacttgacagctccagttgaaacagtaagcacaacagctactcaagcacctgctacagaagaatcaactcaagctgtttcagaagtaacagaagctatcgcatcagcatcagaagcaccagcatacgcagaaactgaacaaccagttgctgatgctattgatcatgtcactgcgtcagcagaagctacacctgaagcagaaactactccagctgctgaaacaccagcacagcctgaagtaaaagaagaagctccagcggcagagcaaccagcagcaacatcagaagcgtcttcagaagcaccagcgacttctgaagcgccagcagagcaaccagcagcaacatcagaagctgtttcagaggcaccagctgcttcagaagcgccagcagaacaaccagcggtagaaccagcagcaacatcagaagtggcatcagaagcaccagtagcttcagaggcaccagcagcacaacctgcatcaacgaatacacttccaacggatccacaccttcaaccacaagctgaagctttccgtcaagatgtagcggcacaatttggtcttactgatatcggtggttaccgtgaaggtgatccacaagaccatggtaaaggacttgccgttgacgttatggtaccagttggttcagaagttggtaatcaagtcgctcaatatgctgtagacaatatctcaaatgcaggtatctcatatgtcatctacagacaacaattctacgcaccagtagataatatctacggaccagctaacacatggaaccaaatgccagaccgtggtagcgttactgaaaaccactatgaccacgttcacgtgtcatttaatgaataagtcagaataataaaaagtcacgcttggcgtgatttttttgatataatggagaaaaagacgaaagaaagaggaactctatttgcaagagtattctgttgaaattaccctaaatcacccagatgatgtcttgtcactttttgggaccaatgagcgccatctaaaacttatcgaggaaaacctcaatgttattattcatgctcgaacagagcgtgtgcaggtccttggagatgacgaggaaagtgttgaattggctcgtttgaccattcaagccctccttgttttagtggagcgtggaatgctagtcaacacttcagatgttgtcgcagccttaaccatggctcaagatggttcgattgacaagtttgttgctttatatgaagaagagattatcaaggacaacagtggtaagcctattcgagtgaagaccttggggcaaaaggtttatgttgatagcatcaaaagtcatgatgtggtctttgggattggtccagctggtacagggaagacctttttggcggttactcttgcggttacagctcttaaacgtggtcaagttaaacgtatagttttgacacgtccagcagttgaggcgggtgaaagccttggtttcttgcctggtgatctcaaggaaaaggtggatccttaccttcgtccagtctatgatgccttgtatcaaattcttggtaaggagcagacgacccgccttatggaacgtgaaattattgagattgcacccctcgcttatatgcgtggtcgtaccctagaggatgcctttgttatccttgatgaggcacaaaatacaaccatcatgcaaatgaagatgttcttgactcgtcttggttttaattctaagatgattgtcaatggggacatgagtcagattgacttgccacgtcgtgttaaatcaggcctgattgatgccatggagaaattaaagggaatcaaggctattgattttgttcacttctctgctagtgatgtcgtacgtcacccagtagtagctgatatcattaatgcttatgaaaaagatgcacctaagtttgatcttgagaaaaaatcagaagaatcagaccaggctaaagaagtagtatcaggattgaccgaatacccagtcattggtgctgaggatcttaaaaagtaaatagctgaaaagaggtttgagagtatgagttctcaacctctttttctttggtagtcaagtcacagatttcctctctatttttggtaaaatagtattaaagagtaggctaatatgaaggggagaggtatgactaaggcaaaaaaatggaagattgctatcattgtattgcttggacttgttgcgacagtcttgatagccataggagagggaagattttggaagtatcaacggaactatattccagatggtacttatcagatgataaaatacgaggataaatcggcatattccaatgaattgataaataggactgagcggggagagaataatgatagcttatatgaggattttatagttgttgagaatatgaaatctcaattttattatgtttttgtgggagatggggaatcttttgtctcaccatttgagcacgatgaaaagctcccacagacttttgacccacgtacagggactttgaaacaggatttaacagtttctgaatataaagctctagtgatttctcatattgataagatttctaaaaagggagaggagtactcaaacgtaaaggaagtatctgtccaaaggtgtgtagacgattataaaaaaatgttgaagcaaaaaagaacttatgaaaagcgccctaatggtctcgttctgactgtttatactaatgatggacatattgagtcgcgtagaacttttaaacgattgagctcagaggaagccaaaggggtcaaaagtggttatgatagggattatgagtatgccttgaagtattataattattcaaggcatgatggggattatctcatctggcgctgatccacttatcgtgcaagcgcctctttactatcaagaatcatagcctaatgttttattaaaaaaccttacagtctttatgataattgtcaaatactatttcaccatttattttggtacaatagaacggtagaccaataaaaaaggagattattatgaaccagcaagagtggattgagtactttgaattagtcaacggtcgcaaaccaactcccgcagagttagctcaagctcaagcagcaggcgagtttatccttgaacgacctaaccctaacgtctttggctcaaatggacaggcgacggagcaaagaccgattaagccagctgaacctgtgataacgatgacacagcagcctcagtttgcacaaacaacagcaaccttccaacaagtcgtacctgctaaaaaaggtatgtctaagaaaactaagattattttggcgtcagtcttgggtgctgtggcagtgattttactttctgttggtggctattcattatggcgttatcagtcaggaaaaattgtagatggaacctatgaagtagtttctttctctcgttatgatgaagacaaagataaaatggttgatggcatagatgaatacaaggacgaaggtttggacttgcagtcttttgtagttgtaaagaataatcaatctagaacctacaatttagtagagagtgacaataaatcatatgttagtttgatggactatgagacagatgttcctcaggtatttgatccgtggaatagaacagagagtcaagttttagatgcggatcaagtcgaagatgtcacaaaagacttcatgaaaaagatgagaaaagactattcgttttataccaaagaggaagctgacaaagtcgttaaaaaaacaacaagagaatataaagataccttgaaggaaaaacgtacctatgtcaagcatggcgatgaatacactctgactacttatgataaaaaagggaagcttcagtcacgtattacttataaacgtatgagtaagggagacgctgaggagcgctgggatgactataaggatgccatcaaagattataagaaagatttgaagacttatagtgatcaatatgatgacttcaaggattactatgattatggttatggctacaattatggctatggttatggtaatgactatggctatggtaatagcgatgactatggtagtggttctaaatcaggctctgacgatagtaaaagtagtaaaaaatctagtgataaaatctaatcacccaatgatgtaaatgagtaaagtggtacgagaaggagagccaaaactccattctggtatcgcttttctttatatggaaataatcaaatagccttggagtcttttttctgttagaatggaagtatcaatgaaaaaggggacttttatgaacgaaaaagagtggttagattatttcgaaacaatcaataatcgtaagccgacagaggaagaaatccaacaagcaaaagctaatggggaatttatttctcaagaggctaaggacgagggtgttaatccacagcaagctcagttgagtgaccaagtgacacaagccgtttcacaagttgctcctgctaagacaggcttgtctaagaaagctaaaattattattgcttctgtagtgggggcgattgtcctagtggcactttcatttggtggctatgcatttatgcacctgcaaagcggtaaaatacctgaaggaacctatctacttgaaacttatcgcttttaccataaagataagaagaaaatggttgatggtatggaatctttcaaggaaagtggcctagaggctcatgattttgttaaagtcaaaggtaacaatgttaaattttatttttataccttagctggcgggaacaatctggttgactttacagactatgatactgacgaagcataccgtccagatgcttggtctagaacgcttaaaccaaacatgtcactatctgaatattcgaaagtcattgaccaggcagtagataatcaatacaaaataagtgaatatcgaactcaggctgataacgatgaaagtaaaaagatttacgttaaatcctacaaagaatctcttgaagaaaccgttcgatacaaggttaagggtaataaattgattgtcactacttataataagaaaggcaaacttacagaagaaagaagtttcaaacgcctatcagaggatgacgtgaagaaattagattatgactatgaacgtgatgttagagcggataaaaagctctttcaaaactagtaatgtttaaaaccagcttagctggtttttttagtgtccaaaacgtgctataataagatgttatatcatcagtgttagcccatttgttaacatatgaaaggaaattaaaatgacaaaaacattctacatcacaacacctatctactacccatctggtaaattgcatattggttctgcttatacaactattgcttgtgacgtcttggcacgttacaaacgtatgatgaactatgatgtcttctaccttactgggcttgatgaacacggccaaaagattcaacaaaaggctgaagaagcaggaatcacaccacaagagtatgtggacggtatggctgttggtgttaaggacctctggcaacttttggatatctcatacgataaattcatccgtacgactgatgattaccatgaaaaagttgttgctcaagttttcgagcgtctcttggaacaaggagatatctaccttggtgaatactcaggatggtattcagtttcagatgaagaatttttcactgaaagtcagttggcagaagtttaccgtgatgaagaaggtaatgtcattggcggggtagctccatcaggacatgaagtagagcttgtttctgaagaatcatatttctttaaacttagtaactacgcagaccgtttgactgccttctttaaagaacatccagaatttatccaacctgatggtcgtatgaatgaaatgcttaaaaacttcatcgagccaggcttggaagacttggctgtgtcacgtacaacctttacctggggagtaaaagtaccatcagatccaaaacacgtggtttatgtgtggattgatgctcttatcaactatatcactgcccttggttatggtcaggatgagcatggtaactttgatttattctggcaaaatgatgaaaaccacgaaatcatccacatgattggtaaggatatccttcgtttccactcaatctactggccaatcatccttatggctcttgatttgccattgcctacacgtcttgttgcccacggttggttcgtcatgaaagatggtaagatgtctaagtctaaaggaaacgtgatttatccagaaatgttggtagagcgttttggtcttgatccactccgttactacctcatgcgtagtcttccagtcggttcagatggcaccttcacaccagaagactacgtggctcgtattaactacgaattggctaacgaccttggaaacctcctcaaccgtacagttgccatgattaacaagtatttcggtggtcaagtgcctgcctatgttgagaacgttacagactttgatgctgatttggctaaggttgtggctgaaaatatcgaagagttccacaaacaaatgaacgctgtagatttcccacgtgccttggacgccgtttggaatatcatttcacgtaccaataagtatattgatgaaacagctccatgggtccttgcaaaagaagatggtgacaaggaacaattggcagctgttatggctcacttggctgctagtcttcgtgtggttgcccacctcattcaaccattcatgatgaccacttcaaatgccatcatggaacagctcggattgtcaggagcgtttgaccttgaaaatcttgaactttcagctttcccagagaatgtgacagtcgtttcaaaaggtacaccaatcttcccacgtcttgatatggatgaagaaattgcctacatccaatctcaaatgaacgcaggcaaacctcaagagaaagaatggaacccagaagaggtcgaacttaagtctgaaaaagaccaaattaaatttgacgactttgacaaggttgaaatccgtgtcgctgaagttaaagaagtagaaaaagtcgaaggttcagacaaattgcttcgcttccgtcttgatgctggtgacggtgaagatcgtcaaatcctctcaggtatcgctaaattctatccaaacgaacaagaattggtcggtaagaaacttcaagtcgtggctaatctcaaaccacgtaagatgatgaagaaatatgtcagccaaggtatgattctttccgcagaacatgacggcaaactcacagtcttgacagtagatccatcggttccaaacggaagtgtgattgggtaaaatatcataaaaaatagtttttcaattttttgaattgggaaactgttttttactaatcttcagttgtgagtaaagcgcttgaaacagatctttgttgagtgctcgaaagttttgcttccttaaaatcggaatgatctactcttaaggaaagtcttaagaggacctagtgtataagaaaacgagttcagtcgaactcgtttttttatacactatatttcaataaatgtttaatgcgttccacactttcatcaggtccataagcatttgggtatcggtctagtttactgatagcgtcaaggtctacttggtctaggtggaagtcaaagctattaaagttttccttcatccgttcgatatgggtactcttaggaatggtcaagatgccttgttgggtttgccatctgaggatgacctgggcaactgtcttgccatgtttttcagcaatagcagttagagttgggtcctgaaaaatactatcctctcctctatgaaaaggagcccaggcttgcgttagggtgccaaattccttatcagctttctggatcagtttgtgttgtttatagggatgcaactcgatttgattgactgctggaatgacaggtgtctgcaaggcaaaatccgccaaacgccctgttgagaagttagaaacaccaatggctctaataagttcttcatgcttaagctcaatcatagcacgccaggcaccatgtaagtcgccaaaaggttgatgaatcaaatataaatcaagatagtcagtatctagtttgcgaagtgtttcttttagggctaatttggtatcttcgtagcctagctggctaatccaggccttactagtcaggaaaatatcctcgcgagggataccagatgccttaatggcacgtcccacggcttcctcatttcgataaaggctagcagtatcaatcaatcgatagcctacagaaagagcatcttcaacggctttttgacattctttttgatcgaaaatttgccagacaccaaaaccaaggacaggtattttgatgccattattaagtgtttgaaattccattttcttctccttagtggtggggtagtaagctatcctgaatttcctcgataaatgcttgaataattgcggattgtttctgtttattattggtcacaaagcccaaggtgtgctttggactgttcttcagtggaagtaaaacaatttggtccttaatgaaactattaacaataccgagaccagaagcgtaactatctgaggcacagagcaaattcatgacactacctcggtcattactgtaaatcacttgttggtcaggcagaacctcgagaggatcttcgtcaaaatggattccagagctttcttgacgaaagcggacctgtgggtatccctctaaatctttgaggttgagggattttttgtgagctagaggatgttggcgacctaagaaaatcttagtttcaaactctccaagtggggtgaaagtcagatccatgtgttgaaaactgcgttctaggatatggtcgttgtcttcatctagataaataatccccaggtcactttcgaagctttcaacgcttttgagaatcttcctagtcgttgtttcaatcagttgaaattcttgatagtcactacgaaaacgttgggcaatgtgagccatgggaagtgataagaaatcgtagtggtgactggcaacagtgaatgatttcttgaatgatttacggtagcgtccctctaggagatctaactctccaagaatacgtttggcgtatttgagaaaatcatgaccgtcatcagttagtttggctcctgtattggaacgctcaaagagttggactccaagttcttcctctaaatcacggatggatgctgagagattaggctgagtcaaaaagagttttttggcagccttactaaaagaccctgtttcagcgatagtctgaacatagcgacattgttgaaaattcataagcatcccctttgaaaaatatgattgtaggtcatattataacaaaatgagaagtctaaaatcagcaaaattctgataggaatagatgaagacctgatatgaaatttctatgattaagtcgttttagaaataataatggaaagtgagctgagctctaagaaaatagttctgataaaagaaaaactgcatccacaggctagacactaaaaatctaacttgtaggatgcagttttaaatattagtcattaagatatctaatggctttcagttttttaggacgaatgaggaagagccctatagcaatcagtggtaaccaaacaatgaaattccagacacttgtagctggagcagcctgtgttgattgtgagagaagtacactagcaaaatcaatcaaacagtgcaggacaatagtccaccacaggctaccagtacgtaagtaaatagccgcatagaatatacctatagctgtcgcataataaacctgaaacagagtagcattcaagggttgatgagtgagatttacaagatgagccaacccaaaggataaggcagataggagaacgacacctaaaacctgttttgaagatttaacaccatcttggaaggcgattttaaggaagagtccgcgagaaacatattcctcgaaaaaaccagcccctaaggcaatagtcaaggcagttcctatcatgtgaggtgccttaatgataccaaaagcacccgcagaaagatagaagaaatctgctaaaagaaccaaccaacatacacttaaggtttcagaccaactgatctttttagttgattttatttttaatcctagtcgcttatggactaggaaatagtagccacaccctaggcctagtgtctttatgagaaaggctatctcctctggcagtggcttaagaagcaaacgaagtacaaggttcgcaaaaataatactaactccaaaaaggatcagtgtcctagtttctttttttgtcattgaaaagtcccccaactttcttaacatttttttcaagcatacgacgaaaaacgactaaagtcaaggacttgaaggtgttttttatgtatttttagttatgaagaggccggttcttgatgacctgcttctaatagaaagcctattctatcgttgaaacagtttattatgagaaaaaaatgaacggctgtaagaaagtaataagtgaaaactctgtaaaatccttacgaattataattaattgtaaagaaatgattaaattataacaaaagtgtgtcaaattttaaaaacatgtagcaaatatataatatttttttcagaagctattgccaaattttgaaaatcacggtagtatattaaacggtgaagaaaataggttaataaaatgttaaccaagaaggagaaagtgtaaatgaaagtcaatccatttaaaacaacattgtattcaagcgtattgcttgcaggactcgcggctacaagcgtagcagctgcggatgaagctaaagatgtaacagcaactactgatactgatgcaaccgtatcaaatacggctgcagaatcaagtgctaaccttgttaaaacaacaggtgatgcagcagttgttactacagtacctggaacagaagaaaaaactactactgaaacagatactactgtaaaaacaacaactaaagctattgctgaagtttcaaatcctgacttcgataacgctgttgaatctgcaacaacgactgcagcagcatcaaaagattctgctgatgttaaagctgtccaagatcaagcagctaaagatgctcaagaagcttcaaatacagttgtttctgaaaataaattgactcgtgaagaagctgatgcagctcttacatctgcaaaagcaaatgttgttgcaacagggggattcacagctacagaagaagcaggtgttaaacacactagcgtcgaagctgctaacaatgacaacaaagttcaaacaacagctttgacaactgcggtttcagaatataaacaaaaacttgcagattacaagacacaattggataaatactaccaagacgttcttgcttatgctgcttgggaaaaatcatacaaagagtacactggtggaacaacagctcgtcttttgacaaaaggcttggctgaaaatgctactggcttgatctataaaacagaatctgatgctactatgactgttgaaaactcagcaggttctgttgactacttggataaaacaatccaatcaggtcactcagtagatgaaatccttgaacaattcaacacatctcgttacattccaagtgactttagtgcagctaacggtacacaatacactatcaatgctgacggtgaatacactgaagatgtatggttgaagatggctacaggtcaaacattgactgtaacatacaacaacctaaacggaacatcattcaatggtactccagttaagaaaattgttgcaacttacactttggtagaaacaccaagtacagatggttcagccattgttaagttgtaccacgatccaactaagacacttttcattggttcacaaactgacgacactaacaaaaaacttcacgttaagatgaacttgaacttctttgattctgagtcatcagtgacaccacttgatttgtctaagaacggatcagttttgagtatctcttcacttaaccactggaacactgagcttggaaaccacattgaaaaagttggtttgaatggtaatgaatacgttcaaattcctggttcatctatcactttgcatgaagatggttatgcttatgcaacaaacgataacgaatttgtggctaacggttcacgctttaacagtgacccaacagtggatccaacaactggtgaagttacagatgaaggttgggatgcgattaacccagacggaacacctcgtacgaagaatgcctactatggtgctgctgcaacaatcttcaagggtgaaccaatggacttcatcgtaagcggaaataaccttaacgttccaactgcttactggttcgcaactaactcaacagtagttgttcctgaattgccagaagaaccaaacaaaccagttcttccaaacactgtttcagcaaaagttacttaccacaaaaactttgtatctgttgaagaaacaactgagaaaccaaaacctcaagtaccaacaactccaacagaacctacaccaggtaaacctgtaacaccaacatcagtacctgtaaaagaagaagctccagctcttccagctactggtgaaaaatcaacagtagcttctgcagcagcaggtgcagctatggtgacatcagctttggccttgttcggtatctcaacttacaaacgtaaacactaagataatacataaaaaagctaggaaaatttcctagtttttttagtttggaaaatcaagttaaccagaaataataaagatgaaattttctgacatttactggaattacttgatttagactgaaaaaagaaaaatagatatacattttctaattttttcaaaatcgcaactaaagcctatattataagcttttctctatagttaactatgtgtaaaataagggtgtaaatattattttcaaaaaatatgaaataaattaattgacaaaaaattataatacagtataatagattgtgttaggaagagtttgtttttttggcagggtgactccctagtcaaaaaggactagcttggaatctggaattctaagttatcaaattccaatgtttcattgtgatgatttaaaaaagagaagatttaaacagcaaaaaattagattaatcgatttaaaacatcagcatcatcgtagcgggagctagcggtatttttaatccgtgtagagcaaacgacagattcaaaaacagcagaatcggtagagactaatcgtcaaaagcgaagagggaaagaaaataaagcagtaactgctaatatacctatcagaaggtggactaaacctaatgactgataggtggtatgttttgagagtggcatttttagccaatactcttctagaaaatagtatcttgtaagcagtgcgacgttctgcgtaaagaagctagagggaaagttcttcagattgactgactatcaatcacaagatactcttaactagaaaccattttggaccaacacggttttgcgtttgttggtattgaactgcacctagggaaatggtggttcaatgttagtaaataaagactttaacttgtaaaagtctaaaaattgttttatctcattatcaactcaaggattaagcttttattgggattgcggaacaaaagggtgataagcatattgggatgatgcttcagtgacggaatttgaccagatgtttgtgagagcatctgtctatgctacattagctatttttaatggttatgtgggatagaaactgttttcaaaatcctgattcctaggaaaattgggggattttccttgaagaattgagattgttgaaaagagatcaaatggactgagcggcacttgtatcccaaggtaagcaatacacctataaacctaagtttccatacagcagggagcaagtttcagtttgaatgggggacgcatctagagtaatctagatgtttttttattttgtgaattcttttacgaataagtaagagagtgcacaaaggagagagtcatgttaattgcaaaaaatcaggaggggaagctcgtttcagctctagaaaccagtttgcaacgtaaggaatcctatagctgtcctggttgccagggagttgtccttctgaaacatggccaggtaatgtgtccacattttgctcataagtctttgcaagattgtcagttcttctcggagaatgaatcggcccaacatttatcccttaaggcagctttgtataaatctttggttaatcatggtgaaaaagtaagtattgaaaaggttttgtctgagatggggcaaattgcagatttatttgttggcgattccctggctctagaagttcagtgttctcggttatctcagcaacgtttgagagagaggacatgtgcctatcaccaagcaggttacgaagtgcgttggcttttgggtgaggaactctggttgaatggacgtttaacagacctacagcgggactttctctattttacggctaagattggatttcacctatgggagcttgattggaagcgtgaggaaattagacttaagtatctcatctatgaggatatttttgggaaagtctattatttaactaaggcttggccgttaaccgaaaatctcatgacagttttacgttttccttatcaagcagagcaggttgagacttatcaagtaactcagcgaaagaaggtctcacatgtgattcaacgagaattaattgggaaaaatccaaggtggatgagaaggcaggaaaaagcctatcttaagggaatgaatttgttatgcctgtctgatcaggatttttttccacaagtgagatttccagaatctaagcagggttttgtacaaattagacagtcacttgaaggttttgaaaagctttttatgcaatattatcgaaaaaggcatttttcttatcgacaaactctctaccctcccaccttttatgctaaaatagtaaagaatagatacaattaaggagaatattatgtcagacaatcgtgctcatttagaagagaaatacacatgggatttgacgaccatttttgcgacagatgcagattgggagactgagtatgaaagcactgttcaggatttgaagaaggctagtgcttatgcaggtcatctcttagattctgctaagaacttgcttgaggcaacagaactttatatgagccttatgcgtcgcttggagaaaatctatgtctatgcgtcaatgaaaaatgaccaagacacaacagtagggctttaccaagagtaccaagctaaggcctcaaacctttactcacagttgagtgaagcctttgcatactttgagcctgaatttatggccttggatgataagaaattagctgagtttaaagaacaagagccaggtcttggactttatgaccactatttcgaacgccttttggcaaacaaggaccacgttctttctcaagaagctgaggagctcttggcagcagcaggtgatatcttcaacggtccaacggataccttcaatgtcttggataatgctgatatcctcttcccatgggtatcagatggtcaaggggatgtggttgagttgacacatggtaactttatcaccctcatggaatctaaggaccgtgacattcgtaagggagcttatgaagcgatgtatgggacctacgagcagttccaacatacttatgcacaaacactccaaggcgttgtcaaggttcacaattaccaagccaaagttcgtcactataattcagcacgtcatgcagcacttgcagctaactttattccagaaagtgtttatgattcactcttggaatcagtgaacaagcatttgccacttttgcatcgttaccttgatttgcgtaagaaggtcttggggcttgacgagcttaagatgtatgatgtctatacaccactttctgagactgaaactgctcttacttatgaagaatccctcaagaaagcagaagaagtcttggcaatctttggtgaagagtatagtaaaggggttcatgcagcctttacggaacgttggattgacgttcaccctaacaaaggaaaacgttcaggtgcttactcaggtggtgcctatgataccaatgctttcatgcttttgaactggcaagatactttggacaatctctttaccttggttcacgagactggtcatagtttgcattcaacgttcacacgtcagactcaaccatatgtttacggagattacccaatcttcttggcggaaattgcgtctacaaccaatgaaaatatcttgacagaaacgcttcttaaagaggtcaaagatgacaagacacgttttgctattcttaaccactatttggatggtttcaagggaactgtcttccgtcaaacacaatttgcagagtttgaacatgctatccatgaagcagatgcatctggtcaaatcttgacagccgacttcatgaataagctttacgcagatctcaatgagaaatactataatctcaaagctgaagataactacgaaattcagtttgagtgggaacgtattccgcatttctacatgaattactatgtctaccaatacgctacagggtttgcggcagcaagctacttggctgaaaaaattgttcatggtactgaagaagataaggaagcttaccttacttaccttaaggcgggaagctcagactatcctttggaagtcatcaagaaagctggggttgatatgaccaataccgactacttggatgcggcctttaaagtctttgaagaccgtcttgttgaattggaagccttggttgaaaaaggtgttcacctttcgtaaaaagaagtcactataagagagaatcattctgaatcaggatgattctttttatgttaaaaaacgaacgtttactagagtataagttctaattgatttggaaatgagttagcgagcatatttatagcccctagtttatattaatgatagactaaaaacctaacgttttatattttataagttaacaatgttcagaaacagaaagtaggtttttgtgaaaacaaccaatcgttatcttgtagcaacgtgtggtgtcttactccatctcatgttggggtctacctatgcttggagtatctaccgtaatcctattatggcccagactggctgggatcagtcctcagtttcatttgccttctcactagctatcttttgtcttggtctttctgcagcttttatggggcgtctggttgaaaaatttggtcctagagtgactgggagtatgtcggctgttctctatgctgggggaaatattctgacaggggttgccattgctcatggagagctgtggatgctttatcttggttatggtattcttggtggtctaggactgggtgtgggttatattacgcctgtttcaactattattaagtggtttcctgataagcgtggccttgcgactggccttgccattatgggctttggctttgcctcgctgttaaccagtcccattgctcaatatctgattcaggcacgtggtgttgagcagaccttttatatcttgggagttgtttattttgttgttatgctttttgtctcgcaattcattaaacgaccaagtgtagaggaagcacaactgttgactgacaagagtccaaaccgtcaagctgctgatttaagtaaaggggttacggctaatgaggccctgaaatcgtcaactttctactggttatggcttatcttgtttatcaatatttcatgtggcttagcccttgtctctgctatttctccaatggctcaagatatggtcgggatgtcagcggaatcagcggcggttgttgtaggtgttatgggaatctttaatggttttggtcgccttctgtgggcaggcttgtcggattatattgggcgtccgaagacctttattctcctctttgtggttaatattgttatggccgtcctcctaattgtcctgcaagtgccacttgtctttgtggttgcgatggctgttctgatgacttgctacggggcaggcttctccttgattcctccctacctcagtgatatctttggggcaaaggagttggctacccttcatggttatattctgactgcctgggctatggcagccttagtggggccgatgctcttatcggtaacttatgaattgacaaaatcttaccagatgacacttcttgttttcatcgctctttacatggtagctttggtcatttcctatctcgtgaaaaagaaggtcatcagtcaagtggcttaataattacgatttggtttatagataagaaatatctctagtactcgctagggattttttatataataaaacacatggttaaatcatatagtaaaaacgcaaatcacaacatgcgacgtcctgtagtcaacaaggatatcgtggactacatgcgaacgcatcttcaggaaaataaagggcatttggctgaactggaggcctttgctcgtaaggaaaatattccaattatccagcacgaagttgttgcttatttccgatttttgttgcagaccttgcagcctaagaaaatccttgaggtaggaacagctattggtttttcagcccttcttatggctgagtatgcacctgatgctcagattacgacggttgatcgtaatgaagaaatgattggctttgccaaggaaaatctagccaagtatgacagtcgcaaacaaattaccttggttgaaggagatgcagcagaagttttgcaagatttggacactgattatgattttgtctttatggactcagccaagtctaaatatatcgtctttctgcctgaaattctaaaacgtctcaaggtaggtggtgtcatcgtctttgatgatatcttccaagggggggatattgccaaagacatcatggaggttcgtcgtggtcagcgtacgatttaccgtggcttgcatcgtctttttgatgcgaccttagataaccctggattgactgctagtttggtccctatgagtgacggacttcttatgcttcggaaaaattctgaaaatattatcttgccagattaagcattatttaagtaagtgtggtataataacagagatattgacaatttaaggagtagatagaatggctaaagaaaatgaaaaccttgagtcaacagaagaaactgttgaagaggttgtagcagacaaagacgcagaacaagagcatcttgatcgccaaaaagaagaagaggaaagcatcgccctcgccagtgaaaaagcgaaagaaaaagctaaacgtgctaaaactaaaaagacacgtgatgctggtaaaccaagctcaggtggtcgcttccttgggggtcttgcccttgtagctgtttcagctctcgttggtgcaggtgctatgtatgtttctctaggtaacaaaacaactgaagaaacaactttggtatctatgaaaggtgatactgttactgttggtgatgtttttgattcacttaaaggtagcagccaaacacaacaaagtgttttgagtgcaactttgcaaaaggctcttgaaaaagaatatggtagcaaggtcagcaaagaagacgttgacaaagcttataagcaagcttcagaacaatacggagatcaattctcacaagtacttgcagcctatggtcaaacagaagagtcataccgtaatcaaatccgtacacaaaaattggttgagtatgctgttaatcaagccgcacaaaaagatttgacggaagcaaattacaaggctgcctacgataactacacaccaaatacagaggtgcaagtggtttcaactactgataaagcagttgcagataaagtagactctgaagctaaggcagaaggagcagatttctcacaagttgctaaagataacagcttggaagtgacttctaagacagttaactcagcttctcaagacttcccagcagatgttttgacagcagccttcaaacaagatgctaatgccgtttctgacgtagtgactgtttcaaacagctcaactggtgctgcgacttactacatcgtcaaaactgtttcaaaatctgagaaaaatgcagattggaaaaactataaggatgatttgactaaggttatcatcaatggtaagaaatctgatactaacttcactaactcagtgattgctaaggtccttaagaaatataacgttaaagttgtagataaggcctttagcgcaattcttgaccagtatgtgactggttctggagcttcatcaagttcatcatcaagctctagcaaataaatcacaagatagagttgataatgctattatcagcttgacctaagacctaaaacacgttaaaatggagagtggctgaaagttctaatatcatgacatttttagccttccctttgagattggtaatcatcgcttctgatacagaaaaatggcggtcgctgcgagccatggacgaatctggttacttgctactcaaagttcacaattaaagacaaataagaatgacaagttcattgaatgaaggtggtaccgcggttcacgtcgcccttcgtttagtggtcttgtcttttattctttgggtattttctgaatgaaatgtatgacaatattggaggtagcgtatgaaaacctattttgtcaaacagaagtttcgattgggtggcgaacgctttgatatcaaggatgatcaaggtagagttgcctatcaggttgaaggatcctttttcaagattccaaagacctttacaatttttggtgaggatggtcgtgagattagtcatatcaccaaggagccgcttagtctcttgcctaagtttacagtagacttgcaggatggttcgagtttttacattcgaaaaaaattaacccttcttcgtgataagtatgatgtcgataatcttggcttgcgaatagagggtaatatttgggacttggattttcaactacttaatagtcaaaatcaggtagttgctaggattcaaaaggagctcttccatctgacatcgacctatactgttactgtttatgaaaatacttacgccgatttggccatttccctgtgtgttgctattgactatgtggaaatgctcgagaatagctcaaaataagaaacatttatttaaggagaaacaatgaaacaacttacttcagcacaaattcgtcaaatgtggcttgatttctggaaatcaaaaggtcacgctgttgaaccatcagctaacttggttccagttaacgatccaacccttctttggattaactcaggggttgccactttgaagaaatactttgatggctctgtgattcctgaaaatccacgtatcaccaactcacaaaaggctatccgtaccaacgatatcgaaaacgttggtaagacagctcgtcaccacacaatgtttgaaatgcttggtaacttctcagttggtgactacttccgtgatgaagccatcgaatggggttatgagcttttgacaagcccagagtggtttgattttccaaaagacaaactttacatgacttactatccagatgataaagattcatacaaccgctggattgcttgtggtgttgaacctagtcatttgattccaattgaagataacttctgggaaatcggtgctggaccttcaggaccagatactgaaatcttctttgaccgtggcgaagactttgaccctgacaatattggtatccgtttgcttgaagaagatattgaaaacgaccgttacattgaaatttggaacatcgttttgtcacaattcaatgcagatccagctgttccacgttcagaatacaaggaacttcctaataaaaacattgatacgggcgcaggtcttgaacgtcttgtagccgtaatgcaaggggctaaaacaaattttgaaacagacctcttcatgcctatcattcgtgaaatcgaaaaaatgtctggtaaaacttatgatccagatggtgacacaatgagcttcaaggtcatcgctgaccacatccgttcattggcatttgccattggtgatggtgcccttccaggtaatgaaggtcgtggttatgtccttcgtcgtcttctccgtcgtgccgtaatgcacggccgtcgtctcggcatttctgatgctttcttgtacaaacttgttccaactgttggtcaaatcatggaaagctattacccagaagttcttgagaagaaagactttatcgagaagattgttaaacgtgaagaagaaacctttgcacgtactatcgatgcaggttcaagcatgcttgacgagcttctagctaaccttaagaaatctggtaaagatacgcttgaaggtaaagacatcttcaaactttatgatacttacggattcccagtggaattgacagaagagttggctgaagatgaaggtttcaagattgaccatgaaggtttcaaagcagccatgaaagaacagcaagaacgtgcgcgtgctagcgtggttaaaggtggttctatgggtatgcaaaatgaaaccctcgccaacatcactgaaccatctgagttcttgtacgaagctgaaactgcagaaagccgtttgagtgtcatcgttgctgatgatgctcgtcatgatagtgttaactctggtcaagctctccttgtctttgaacaaacaccattctacgctgaaatgggtggacaagtagcagaccacggtacaatctcagatgcagctggtacagtcgttgcgcgtgttgttgacgttcaacgtgcaccaaatggacaagcgcttcacactgttgaggttgaaggcgaacttgttgtaggtgctaactacaaacttgaaattgaccacacacgtcgtcaccgtgttatgaaaaaccatacagcgactcacctcttgcatgctgcccttcataatattgttggtgatcatgctgttcaagcgggttctcttaatgaacaagaattcttgcgtttcgacttcactcactttgaggctgtaactccagaagaattgcgtgctatcgaagaacaagtcaacgaagaaatctggaaagccactccagtaacaactattgaaacagacattgacactgctaaatcaatgggagctatggccctctttggtgaaaaatatggtaagaatgttcgtgtcgtttcaatcggtgattactctgttgagctttgtggtggtacgcacgttgccaacactgctgaaatcggtatgttcaagattgtcaaagaagaaggtatcggttcaggaacacgtcgtatcttggcagtgacatcacgtgaagcttaccttgcttaccgtgaagaagaagatgcccttaaagcaatcgcagcaacacttaaggcaccacaattgaaagaagtacctaacaaggttgctagccttcaagagcagttgcatgctcttcaaaaagaaaatgctgctcttaaagaaaaagcagcagctgcagcagctggtgatgtcttcaaagacgttaaagaagctaacggtgttcgttacatcgctagccaagtagaagtttctgacgcaggtgctcttcgtacctttgctgaccaatggaaacaagcagactactctgacgtacttgtccttgcagctcacattggcgaaaaagttaatgtccttgtagcaagcaagtctaaagatgttcacgcaggtaatgtcatcaaggttctcgcaccaatcgtatcaggtcgtggtggtggtaaaccagatatggccatggccggtggtagcgatgccaatggtatccaagatcttctttcagcagtagcagaacagctttaagatgtgatacaataaaagaaacttgaaaaggtaggatgaaaatcctatctttttttctttaaaaagtttagtaataatattgaaatacttgtaaaatatttttaaaagaagtatactataggtgtgaaaacggttccaatttttatcaaacagcctagaaagtgagagtgatcaaaatgagaaaggcatatgtttttaaggaacgtcaacgttactcaatacgtaaatattcttttggagctgcatcagtcttaattggtgcgagcttgatgcttggtggacatgctttggctcaggaacaagccaatggcgcaagttccagcaaggattatgaagtttttgtaaataattctgaaccacttcaaatcgaccaggcgacttcagaagctgttaccgatgtcctcaatcaaccagcttcaagatctgaagcgccaagacctaagcttgtcagcagtgaagttgcttcttctgaagctagtagtgtagtggctagcgaggctgcttctttggaagtaccggcagaggttgctcattctgcatctgctgtcgcttctgtttctagatcagaagtggctaatccacgttttgaagtgtcatcagtagctagctctgaagcagcaagtgagactaaccgttcagcaacttcagaagtagcagaagttagaggtactgaccgtgaagctgtcgaaacacgtcagcctggtgtggatggtcctgtgactgctgatggttctcttgatatcccatcaaacggtactttctatttccgtcgcacaactgaaattcgtacagcgcctatcatggatatcaagcctacatttgtctttagtgcaggtgaccatgttatctatgacaaggtcttgaagagagacaatcatcaatggatttcttacattggctacgactatgaacgctactacgctgatatcgcagcattgaaggctgaaaacactagtagcaccactgaagcaactagagatgaagtcatccctgaacgtggtacttattacttcactaaacctgcagatgtgaagaaccaacctagcttgactgctaagactgagttcaattttgatcctggtatgtcagtcaactacgatagatctttgctcgctgacaaccaccgttggatttcttatgtgtcctacaatggtactcgtcgttacgttgacctaggtgccgctgcagaggctgtagctaaaccaagaggcgatatcgctattgaaagtcatgacaatggtgactttagtgtagttatcagtaatgtttcagaccaaaacggtatccttggggtatctgtaccaatctggtctgaaaagaatggtcaagatgatatcatctggtacaatgcgacacgtcttaacaacggtaactacaaggttaacgttagtctaagtgaccataagaatgaacgtggtctctacaatgttcatctttactatgttgaaactaatggtaaattagttggtgtgggtggcacaacttacacagttcctgctaaggttgaagaaactcatacaacaactagttatagccttcctgactcagggacttatactttcaaagaacgctctagcattaaggcagaacctcgtgtagcaagtccagagttggcctactacgatgctggtatgtcagttaactacgacaagattgtcagtggtgatggttatcaatggctttcttacctcagctacaatggcaaccgccgttatgtagccgtggctaaacttgctcaacaagaaagcaaaccaagtggcactatcaatattgaaaatctctctaaccttggtttcgacgttcatatcactaatgtttctggtggagacaaggctatccaaggcgtaagtgttccagtttggacatccaaagacggccaagatgatcttgtatggcaccaagctgacagacaaagtgatggtagttacaaggttcgcatcaatgttagtgaccataaggccgaagcaggcgaatacatcgtccatctctactatgtccaagacggtaagatggtaggtatcggaggcactagcacaactgttccagttcaaaatgcaacccgccacaaccttccagcttcaggttcatatacctttaccgctcgtactggcatcaagactcaacctttggtagccaacccagatgttagctattacgattcaggaatgtcagtcaactatgacaaggttgtcaataatgatggctatacatggctttcttacctcagctattcaggacatcgtttctatgtggctatcgcaccaacgagtgagactaaacctgtagaacaacctgttcaaccaagtacaccatcatctggtacctatactttcaaagaacgctctagcattaaagcagaaccaagtgtagcgagtccagagttggcttactatgatgctggtatgtccgttaactatgacagattggtgactgcagatggtcatacatggatctcttatgttagccatggaggcaaccgccgttacattgccattgatggtaaggcaaccgcagttgctcaaccagcaagtccaagcctagcggcaactggtacttatacctttacaaaacctagctctatcaaggctcaaccaagtgttgctagtccagagttagcctactatgataaaggtatgtccgttcgctatgacaaggtcctaacagctgatgggcatacatggttatcttatatgacttatagcggtgcaagacgctatgtggatatttcttaagagttgtaacatcactctcttttgagggtggtgttttttatattttttccacttttcctaacaaaattacgaataaataagtatggcttgcttcggctttcgattatgacaaaaaatggacagtttatgatttagatgtgtacaagtcaaataaatttggtatactaatggacaagtgagaaatatttagtaatattctgtaaaatacttgtaatatttgtcactgagtgttacaatcaaccagtaatattaattcgatagagagaaataataatatgaaacgagaaaaatttttacacgaacaacaacgtttttccattcgtaaatactcatttggggcagcatcagttcttttaggagctagtctggtctttgcgggtcaagctttggctgatgagcatcatgaggtttcaacaccttcaaatgcttctttgtttgctacctcagatagtgatgctgtgaccgcagctgatattttcagtggtgtagcaacagatggggtagcgtcaagtgagaaagctagtcaagtttcaacaactagccaaaccgctagtgaaactgctactagcgaggctacaagtgaagtgagtactagtacctcacaagcaacagataaaacttctgaatcaacagctgccagctcagaagcaacaagtgctataaatgctccatctgaaaaagccactaaccttgatgtatctgccttaacgagagcagctgtcaatactagtttggtgagccaaccagctacaactacagacagcgaccttccaagccaaggaacttatgtctacaaggaacgtacagaggttaagaatcaacctaaggtatctgccaaggctgaattttatgtgaatccaggggatagcgtcctttacgatcaagtcgtgacagctgatggctaccaatggattagctacaaatcatactctggtgtgcgtcgttatgcgccagtgaaaccagtggcagctggtagcggtaacggtaatagtggtaatggggatggcaaaccttctagtggtgctcaagccacaacaggtgctttggatatcccagcgacaggaacttactactttacacgtgacacagatattaagaaagaaccaaaagcagacctcaaacctacttttgtttttggtaagggtgaccatgtcatctatgataaagttttgacagctgataatcaccaatggatttcttaccttggttatgactacgttcgctactatgcagatattgcgactttgacacctgccaaagctgaaacaccaactgttaaaccaacagaaactaatcaagcaaaaccagaaactactggtgctgaaaagcttccagaaagtggcacttataatgtgacacgtagcttgaatgttaaaaatgaacctaagacttctgcagaaacgctttataccttggaaaaaggttacaaagtgaactatgacaaggtattgactgcggataaccatcaatggatttcttatattagttacagtggtacacgtcgttatgtggatattgcgaccttgaaaactactgagtctaagccacaagaaaacagtgtttctggtaaccttactatcaacaatcaaacctctaatggttttgatgtagtcgtaaccaatgtttcaggtggtggcaaagaagttaaagaagtgcgtgttccaatctggtcagataagaatggtcaagacgaccttacttggtatcatgccgataaacagtcagatggaagctacaaggttcatgtagacacagctagtcataagggcgatgctggtacttattctgtgcatctttactatatgttagatggtaagagaacctatatcacagaaactaaagctacggtccctcaatctactgaatcccaagtgacagggaaattgaccatcaacaaccaaacgtctaatgggttcgatgttgtcgtaaccaatgtttcaggtggtggcaaagaagttaaagaagtccgtgtcccagtttggtcagataagaatggccaagacgaccttacttggtatcatgccgataaacagtcagatggaagctacaaggttcatgtagacacagctagtcataagggcgatgccggtacttattctgtgcatctttactatatgttagatggtaagagaacttatattactgaaacaaaggcaacggttcctcaatctgtcgaatcacaagtgacagggaaattgaccatcaacaaccaaacctctaatggttttgatgtagtcgtaaccaatgtttcaggtggcggcaaagaagttaaagaagttcgtgtcccaatttggtcagataagaatggccaagacgaccttacatggtatcatgctgataaacaatcagatggaagctacaaggttcatgtagacacagctagtcataagggcgatgctggtacatattctgtgcatctttactacatgttgaatggtaagagaacctatattacagaaaccaaagctacagtccctcaatctacagaatcccaagtgacagggaaattgaccatcagcaatcaaacctctaatggttttgatgttgttgtaaccaatgtttcaggtggtggcaaagaagttaaagaagtccgtgtcccaatctggtcagataagaatggtcaagatgatctcacttggtatcatgccgacaaacaatcagacggaagttacaaggttcatgtcgccacagctagccataagggcgatgctggtacatattctgtgcatctttactatatgttgaatggtaagagaacctatatcacagaaactaaagccacagtccctcaagctacggaatcccaagtgacagggaaattgacaaataacggttcttactacagtgttcgtggtaaatatgatgacattatcattgtcaataagaaacatggtctttctaaggactataacccaggtgaaaatccaacagctaaggcagcctttgttcgtcttcgtgatgatatgattaaccaaggtttgaatgttggacgttcatacagtggtttccgttcttatgactatcaaaagactctttacgacaactatgttagccgtgatggtcaggcagctgcggaccgttactcagctcgtcctggatatagcgaacaccaaactggattagtctttgatttgaccgataaatctggtaatttgcttgaagattcacgtgctagtcaatggcttaaagacaatgcacataactatggctttatcgtgcgtttccaagcaggtaaagaagcttcaactggctacatgccagaagcatggcacatccgctatgtgggtaaagaagctaaagacatccacgattcaggtttgagtttggaagaatacttcggtatcgaaggtggagattattatgctagcagcaaacctgctgaaagcaaaccagccactacaggtgctgtcaaccttccagcgacaggaacttatactttcacaggtcgtgcgtcaatcaaggcggaagccaaggtttcaagcccagagttggcctactatgacaagggcatgagtgtaaactacgataaggttttgacagccgatggtcatcaatggctttcatatgtgacaacaagtggtgcgcgtcgttacgttgatattgcaacagttaaagcgacagaaactaaaccagaagttaaaccagttgctaagccagcggataaaccaaatctccctgaatcaggaacttatacctttacaggtcgtgcctcaattaaggcagaagctaaggtttcaagtccagagttggcctactatgacaaaggtatgactgttaactatgataaggttctcacagccgatggtcgtcaatggctctcatatgtaacagcaagtggtgctcgtcgttacgttgatattgcagcagccaagtcagaagctaaaccagaaacaaaaccagttgcgaaaccagcggataaaccaagtctgccagaatcaggaacttataccttcacaggtcgtgcgtcaatcaaggcagaagccaaggtttcaagcccagaattggcttactatgacaagggcatgactgttaactatgataaggttctcacagccgatggccgtcaatggctttcatatgtgacaacaagtggtgctcgtcgttacgttgatattgcagcagctaagccagaagcaagtcaaccagccgcaaaaccaagtctcccagaatcagggcgttataccttcacaggacgtgcgtcaatcaaggcagaagctaaggtttcaagtccagagttagcctactatgacaagggtatgagtgttaattatgacaaagttttgacagccgatggtcacacatggctctcatacatgacagtgagcggtgctcgtcgttacgttgatattgcttaatgaaggaatgaatcaggttggacaatgtgtccagccttttttgatagcctttctttatcatgagattgaatttttcaatttttgtgacgtcttttggagtgctataatggttaatatagaatcgaggttactatgaaaatcgcattggtacagatggatgttgctcacggacagcctgtggaaaataaaaagcacgtgaaagagatgttggaaaggacgcttgatgacaatcccgatgttattgtgcttcctgaaatgtggaatacaggctatgctttagatgaactgaatgggcttgcagacaaggaaggtttggactctcaagaactcttgtctcattttgctaggaaacatgctgtggctattatcggagggtccgttgctattgagaaggacggcaaattctacaacacgacctacgtctacaataagtctggggacctaatcaatacctacagcaaggtccatctctttggcctcatggcagaggaccagtacatgtctgctgggtcttcggagtctgtatttgagcttgatgctgtgacagctgctagtgtcatttgttatgatattcgttttcctgaatgggtgcgaacacagatggcacaaggggccaaggtactttttgtggtagcgcagtggccagaacctcgtgtgcagcaatgggagattttgttaaaggcgcgtgcggttgaaaatcaagcttttgtagttgctgttaatcgtgtcggaacaggaccagacgatgtcttttcagggcattctatggttatcgatccacttggaaatgtggtcttagaatccaaggagcatgaggagggcatttttacggccgatattaatcttgaagaggtagataaggttcgaggtcagattcctgtttttgaggatcgtcgcacggacttgtatcattaaggagcgtttatgttatttgaagaatcggacttattgaaggcattgccagaacagttttttgcaggtttggttgctaaggttaatgccaaggtggcggaaggagcagatgttatcaatctcggtcaaggcaatcccgaccaaccgacctatgaccatattgttgaggcgctgtgtctttcagcgaaaaatcctgctagccataagtattcacagtttcgaggcaatcgtccctttaaggaagcagctgctagtttttacaagaaacattatggggtcgatttggattccgagcgtgagatttgtgtcatgggtggagctaaaattggactagtggaattgcctctagctttgatgaatcctggcgacctcttgctcttgcctgacccaggttatccagattacttgtcaggagtgagtttaggccgtgtgacctatgaaacctttcctttgacggctgaaaatgatttcttgccagatctggatgccattccagaggagacagctcgccgtgctaagtttatctatatcaattatccgaataatcctacgggggctgtggcgactaaggccttttatgaaaagttagttgcttgggcgaaaacttacgaagtaggagtggtgagtgatttagcctatggagctttgggttatcagggctatgagaatcctagcttcttgtcaacgcctggtgctaaagatgtgggcattgagttctatactttctcaaaaacttttaatatggctggttggcgtttggccttttcggctgggaatgaccagatgattgaagccttaaatctgattcaagaccatctttttgtgggaatctttcctgccttgcaggaggctgggattgcagccctcttaaatcctaattctgaggaggctgttgctcaacttaatgcgacttatgatagccgtcgagatgcttttgtccaggcagctgctaagattggctggcaggccttcccatccagaggttctttctatgcttggatgcctgtgccagagggttacaccagtgagagttttgcggatcttttgcttgagaaggcccatgttgctgtggcaccagggaaaggatttggtcctgcgggtgacgcttatgttcgcattgggcttttggtagagccagaacgtttggttgaagcagtcaatcgtattgcaaacttgcatttatttaataactagatagtaatcgtgaaaacaagtagttgaaaaagactgcttgttttttcatattaattccatgtttctcttgacaaatgaataaaaatacaataaactagttacatatttatacaaaaggagtgcataaatgaaagtttcaatcgttggtatcactggttatagtggtttagagttagttaaaattttgaataatcataaaaaagtggaacttgtttctattcacgcaaccaaggaagtgggccgacgattgtctgatgtgtatccctatctgacaggtgtttgtgatttagaaattgaagcttatgatgcggaaaaaattatggaaaaggcagatttggttttctttgccacaccttcaggagttgctagttcgctagcagaggaatttgttcaagctgattttcctattattgatttatctggggaccatcgcttgccggcagatgtttatcaagaatggtataaaaaatcacctgccaaccagagtgttttgaataaatttacatacgcattatcagaatatacagatgtgaagggcaagaaatttattgctaatcctggatgctatgcaacagcgacggagttggccctgattcctttggttgctactggtctgattgagacggatagtgttattgtggatgccaagtctggtttaactggtgcgggtaaagctttaagtgagtctagtcattttgtcaatgttcatgataattacgtgacttataaacttaatcatcatcagcatattcctgagattgttcaaaccttgcagacctttaatccggaaatgcctgagattcagttttcaacgtcgcttttaccagttaatcgtggaatcatggcttcggtttactgtaagttgaagaaggacgtgacggtatctgatgtggcttcagcattcacaaaggcttatagcgataaaccctttgtacgtgttcaagacagcttgccagaactgcacaacgttatcggatcgaattttacagatattggatttgcctataatgaaaaaaccaatgttctgacagttatttcagttattgataatctgcttaaaggagcagctggacaggcagtgcaaaatctcaacctcatgcaggggtgggatgagacggaaggtttgcttatgacaccgtcatacttgtagatgtaagcatagagttaggagaaaaaatatgaaagtcatagatggaacaattgctagtccgctgggattctcagcagatgggctacatgcgggatttaaaaagagaaaaatggattttggttggattgtctctgaaaagccagccagtgtggcaggagtttacacgaccaataaggttatcgcagctcctttgatcgtgaccaagacctcagttaaaaaggctgggaaaatgaaggctattgttgttaactcaggtgtagccaattcttgtacagggactcaagggttggaggatgcctacaccatgcaggagtggaccgctgaaaagctaggtgttgaaccagacttggttggtgtagcttctacagggattatcggtgagttgctaccaatggataccttgaaaaatggtctttccaagttggtggtcaatgggaatgctgatgattttgccaaggcgattttgacgactgatacagcgactaagactattgctgtgacagagaccttcggacgtgatgtggtcactatggctggtgtcgctaagggctcaggcatgattcaccctaatatggcgaccatgctaggatttattacttgtgatgctaatatttctagtgatacccttcaattggccttaagtcaaaatgtggaaaagacctttaatcagattacagttgacggagatacttcaactaatgatatggttcttgtcatgtccaatggttgcacgctcaatgaagagattttgccagatacactagagttcgataaattttcgaagatgttaaatttcgtgatgcaagagttggctaagaaaattgctaaggacggtgaaggtgctaacaagctcatccaggttgatgtggtcaatgcccctaatgcccttgatgcacgtatgatggcaaaatctgttgtcggttcaagcctagttaaaacagctatttttggtgaagatcctaactggggacgtattttagctgctgttggctatgctggtgtggatgttcctgtggataatgttgatattatgattggtggtctgccagttatgttggcctctagtcctgtttcctttgatgatgaagaaatgaaagacatcatgcatgatgatgaagttactataacggtagatcttcatgctggtcatgaaaaaggaactgcatgggggtgtgatctttcctacgattacgttaagattaatgccctctaccatacttaagttatctatgataaaggagttaactgatgactactgaatatattgtaatcaagattggtggagtagccagtaagcagctaactcctgagatattggctaaactgtcagaatggcagcaggctggtcaaaaaattgttattgtccatgggggcggttttgctattaatcagctgatggaggagaatcatattccaattcacaaggtcaatggtcttcgtgtgacgggtcagtcagatatggccttgatcaaagaagccttggttgacatagttgggaaaaacttagcagatgagctgacaactgcaggtttgccagcctatcagcttgtagatgaattgccagatcttgtccatgctgatttcttagatcaagagacctatggttttgtgggtgaagtcaaaaacatcactaatcaaactctagtgagcctcctatctcaagataaacttcccttgattcctagtctaggctatagtgagcagggggatttgctcaatattaatgccgattaccttgctagagcagtggcgattagtctaggagctaaaaaacttatccttatgacagatgtcaagggtgttttggaaaatggtcaggttttggaacagctgaattttgtggacgttcagaaaaaaatagattcaggcgtgataactggaggcatgattcctaaaattcaaagtgctgttcagacagttcaagctggtgtcgagcaggtcattattggtgataacctgacagacggtaccataatcaaggagtaagagatgacaaaattattttcaaattataaacgggcagcgattgattttgcttcggctcagggcaattatttgacagatacaactggcaagacctacttggatttttcatcaggtattggggtaaccaatctgggttaccatccccatgtcaatcaggctttgacagagcaggtgggcaagattttgcatcagcctaatctctatcacaatcagttgcaagaagatgttgctgaccttttaattggtgacaaggactatctggcctttttctgtaacagtggtgcagaggccaatgaggcagccatcaaaattgcccgtaaggcttcaggtaaacaagaaatcattaccttccaaaattccttccatggtcgaacgtttggctccatgtctgccactggtcaggataaaatcaaacaaggttttggtgaaggtgtgcctcactttagctatgctattttcaatgacatagacagtgtcaaggccctagctagtgaagaaactgcagctattatgctagagttggttcaaggggaatcaggtgtgcaacctgcggataaggacttcgttaaggctttgtctgatttttgtaaggagacaggtatttatctcattgtagatgaggttcagacaggaattggtcgtactggtaagctttatgcttatgagcactacgatattgaaccagatatctttacattggccaaaggtttggccaatggggtaccagttggtgctatgcttgccaagtcatctcttggaggggctttttcttacggaagtcacggctctacctttggaggaaataaactggctatggcggcggccaaggctacgcttgaagttatgttggctccaggatttctggatactgctcttgaaaatggaaacaagctacaagcacaattgcagtcagctttatctgataaagagacagttaccaatgtacgtggtttgggctatatgattgggattgagaccactggcaatctgggagaattggttcagtcagctagagataagggcttgattgtcttaactgcagggacaaatgtgattcgactcttgccaccaatcaccctaagtgatactgaaatcgaaaagggtgtggctatcctatcagaaatatttgactagaacataaaaatcacttgattcttgaatcaagtgatttcttttattcattgtcagtagcaatctcgctgagaagtcctttagctgttgttgttggcagaatacggacacgattaagtgagaggagaccatccttggcactagctagcccttcgttagttgtcagtcctaacttgtatgttttcttagctaggtccagtgtcgtttgattgtagcgacctgatgggtaggcaatggtattgaccttagtattgagtttgttttcaaggaagtcaatagaatccgttaattcaaccttttgtgttgccttgtcagtggctgataaatcagggtggttaaccgtatgagactggaagctcatgccgtgcgccatcatttctttcatctgcttgacggtaagatttccagcatttcccttcttaacaaagccagtgatcacattgttggtcgccttagccttgtattttttgagaatcggataggcaatcgtatagaaatcttcgttaccatcatcaaaggtcagccaaacaaccttcttagcaggcaaggcattttcggtgaaggccttataggcttcttcaggcgttaggaaatagtaacctgcctttgacaaagccttgatttgtgcctcgaagaggtctgggtcaacgataaggttggcgttagaagcttcagatggatccatgacgtgtacggcatgatacatcaggatagggatttggacaggctcgtcataggttttccatttagctgtactcgtagattggcttgtctgggttcctttttggctatttccagactggcttgggcggtttaacataaaaactgccagtaagccaagaaggactaggtttaggaaaagcagaagaaggttcagtttctttctgtcagcgttagttgaatttttcttttgagaagtcattgtatcccctttcaaataggtctagctattattctaacaaaaatggagtggaaatgcacagaattttcagtaaaaaagaatacttagctccttaaatggcaacaatattctgtcaattccgatagaaatatggtacaattaaaaaaatgtatgtttttaaggagaaatcgtaaatgtctattaaaattggattgcttggctttggtacagtagctagcggtattcctttccttttgaaggaaaatggtgaaaaggttcttgcagcctcacgtgaccaactcgaaattgcgaaggttttggttaaagatgacgaggaaaaaaatcgtcttatcgctgcaggcaacgactacaattttgtcacaaatgttgacgaaatccttaacgatgacgagattcaaatcgttgtcgaattgatggggcgtatcgagccagctcgtaccttcatcacaaaagcgcttgaagcaggtaaaaatgtcgtttctgccaacaaggacttgattgcaactcacggcaaagagttgatttctcttgcccaagataagggcgtggctttctactatgaagctgccgttgctggtggtattccaattttgcgtactttggctaactctttgacatctgacaaggtgacacgtattcttggtgtgctcaacggaacatctaacttcatgatgactaagatggttgacgaaggttggtcatatgaggatgctcttaagactgcccaagaactcggttatgctgaaagtgatccaaccaacgacgttgaaggtattgatgctgcttataaagctgttatccttagccaatttggttttggtgccacaattgatttcgacgatgtgactcacaaggggattacaaacatctctactgatgatgtagctgtcgctcaagaattgggctatgtcatcaaattggttggtgatgtgcgtgaagtagaatcaggtatctctgcagaagtatcaccaacattcttgccaaaaaatcacccacttgctagcgtcaacgatgttatgaatgcagtctttgttgaatctatcggtattggcgaatcaatgtactacggtccaggtgctggtcaaaaaccaacagcaacatctgttttagcagacattatccgtattgctcgtcgtctttcagatggcaatgttgggaaaccattcaacgagttccgtcgtgacttgccattggctaatccagcggacgttaagagcaactactactttgctcttgatacgccagacgaaaaaggtaaaatccttcacttgtctgaaatctttaactcagaagatatttcatttgaacaagtcttgcaacaaaaagcaaatggcacaacagctcgtatcgttgtgattacacatgctatgtctaaaacacaactcaaagctgttactgaaaaacttgaagcagcagaagacttcactgttgtcaatacattgaaagttttgtctaactaattgataagcccatactggtgcgtataagaaaggtattcaaggagaaaagtcgctgatggctttcctccttttggtgtattattatgaaaattactgtcccagcaacatctgccaatattggtccaggttttgactctgtgggtgttgccgtttctaaatatttgacaatcgaggtgcttgaaccagcagatgcatggcatatcgaacacgatttgggcgatattccctcagatgaaaataacctcctcatttcaacagccttacaagtgaagtctgatttgcagcctcataaattggtgatgacatcagatattcccttggcgcgtggtctcggttcttcaagttctgttattgtcgcaggaatcgagttggctaatcaattggcagacttgcagctctcagacgatgataaacttgatattgcgaccaaaattgaaggtcacccggacaatgttgccccagctatttttgggaatcttgttgtggcctcttatgtggacgaacatgttaatagcattgttacagagtttccagagtgtgcctttgtagccttcattccgagctatgaacttaagacgtctgattcacgtggggtgcttccaagtgacttgtcttacaaagaagctgtagctgcatcatctattgccaacgttgccattgctgccctctttgcaggtgatttggttaaggctggacgtgctatccaaggagacatgttccacgaacgctaccgtcaaaaattggttaaagaatttgcgactattaaggaattatcaggccaatacggtgcttatgcgacctatctctcaggtgctggtccaacagtgatgaccttgactccaaatgatcaggctgaggctcttaaaacggcaatagatggtcttggtttagatggtgaaaccttcatcctatctgtggataaagcaggtgttgtcgttgactagaaaaaatcaagggctactctttggtttagcaacctatattcaatggggatttttatcccttttttggaagcttttagcaggtgtttcggcttataacaccttttcatggcgaattgtttttactgtagtgactatgttggtctatgccctggttgctaagcaaaatgcacgttttaaagatgagctagtcgaactttggcaggataagaaagtcctacttcgcatgctacttgccagctttctcatagcagctaattggttgatttatatctatgctgtgggtcatgggcaagcaacgcaggctagtctgggctattacattatgcctattgtttctatcctgtttgcccttatttttcttcgtgaatctctaagcagaaccatgtgggtagcagtagccttagcttttattggggtcttggttcttgttgtcaatacaggaaaacttcccatggtttctttggggctagccctgagctttggtttttacgggttaatcaaaaaaggggttaagctctccagtgacgtagccatgctagtagaaagtggattgctactaccttttgtagccatctatctcattttcttttctccagaatcattttcgtcctattcgagcatggaaatgtttctcctagccatctcaggtgtggtgactgccgttcctttgctttgcttctcggaagcagtcaaaagggcaccgcttaaccttatcggtttcatccagtatcttaatcctacgattcaacttctcgtagccattctcatttttggtgagacggtcagctttggagaattgaaaggctttctctttatctggatagccatcctagtctttgtaactggccaaatagtaacatttcgtagaagttcctgatagctatcgggaactttttataatgtcgacctaaaaatgagccaagtttatctgacaattttagaactttaagctataatagtagtattagattaaaatagcggagaattttatgcgaaaaatgaaaaagctagtgggctatctgattctgctcgctatcccagttgccatcgctgcaggcctgtttatctttaacggttcaggttaccgtttgtcagaacaagatgcagcagacattgcttacaaaaatgcaggtgtcaaaacttctgaaatttctcaatcaacagtttcgaaatcacgttctgggcttcacggaagttatgagattagtttcacaacgtcagacaaccattttgagtatacgattgacggtcagtcaggatctattttgaaacataagaatgaccatccaacatctaaggatgaggatgatactcaaaaaagtgaagagcctaaagacgagactcaatctagcgaaagcaaggaagagacagcagtatccaaagaaactgcgcaaacaacagctcttaaccatgctggcctagctgaaggttctgtgactaacttgaaaacggacttgaagactgaaggagacggtaaagtctacaatatcagttttgattatgctgctagtggtctacgttataaatacgcggtaaatgctgattcaggagctatcgtagcctatacaactgagtatctgacaggggctgcgactcctgctcagtaggtcgcagatagagtgaaagctctccttattattgaggaaaatccttgcaatttctctgaaatggtgtaaacttaaagtgaaaacggtaacagtagttgtaaaagttgccgtagaatcaaggaggctttgaccatgaaagaattccaagcatttaaagacacgcttagcaataaggctctcaaagccatttacgaagaaagtaaattggaagttcaagatgaaacaaccgaaggtacagaagccttctcactagccttggcaacccaaatggctatcaatctacttgaaagctatgaaaaatggctaaaagaagaaagagctaaggaagaaaaataagatgcaatccttgtcggcagacagggatttttcttatgaaaataaagtaatttagcatgtagattatctatcctgaaataactataatcctatcatttctgtacttaaaataaaattaatgctttacttatgataaaggagccattccttgtgaaaaaggtctcgatttttgctgatgttttgttacaatgttttcagaaagttcattaatagaggagtagagagatgattttcttggtggttaggatgattactatactgttaggggttatagttgcttattggctattgtgttattttattaatcagacaaagtccgaacatgttttaataaaagcacatcaaagacgagttgcagctgggagaaagctcaaagatgtttgtgagcttgaattaaaagttcataaagaacattttcggaaagatttcgaaggaaagtgatggtggactttatggagttagttaaatcatttcttgcggcgccctattttcttggggtgattcttggtggtgtatttttaggaatttatgtgttgatagataagattattaagaatccgatgaaagatatcgattattacaaaagttttgtagaatcttacaaagaagaagcggatttttataaaatgacctccgaagagtataaaactatggcaataacttaccgtaataggtatttggaaagccaaacaaagttagaacttgtcatgaaagataatagtagccactgaaaattgtgaggaaaagtaaggcagaggaagtattttcaaattcaaaaatcaataagatttccaccacaatttcatttgtcttgagattaaaaatgtgatagaataagaccattcagaggtgctttgaagcccatttgtcacaggaagcggtggtactgagaaatccgcacaaatgtcaaagctggttgctgatggtcaaattgaatcaaaaaagctgtgagtggttaccactcaaaactgggtggtaccgcggatacacattcgtccctgtcatagttatggcagggattttttatatcttttaaagaaccaagaccgaaggtcgcaggtggatttagagatattgatgcagacggagcgaaagcgaggtctacgttcctaccaaaggagggtgacatgaagcaatcttttgagaccagtaaattgtattatggtttccccatttttatcttgggttaccaggaccagacacatggctataatgtgacgacttgtagttcttcctatagtctaggagattggctggtcatcggggttggtagcgaggaaaatgcggcagatcagattaaacattatcagaagtttacggttaatatccctgatgaaaacgtcatgctagagatggaacaggctggttttattagccatcgtgaaaagattgctaaacttggcttggatttccgactttctgaactgacacaagcacctattttggatgcttgtccagtcgttttggattgtaaggtcgacagaattatagaggaagatggtatctgtcatatctttgctaagattctagaccgtctggctgaatctgatttgctagatgacaagggccattttaaaaatgaccgctttgcaccgacttactttatgggagatggtcataagcgtgtctatcgctatctagatgaccgagtcgaccccatgggaagcttcatcaagaaagcgaggaagaaggatgacaagagctgaattgccagaacgaatcgaaacggagcgtcttcttttacgagtccgaacagtggcggatgcagaagatatccatgcttatgctagtcttccagaagtttcttacccagcaggctttccacccgtcaagaccttggaagacgagatctattatctagagcacatccttcccgagcgcaatgaaaaggacaatcttccagctggttacggcattgtggtcaaagggactgataaagtgatcggttctgttgatttcaaccatagacacgaagatgatgtgcttgaaattggctataccttgcacccagactattggggtcgaggctatgtgccagaagcagcgcgtgctttaattgacctaggatttaaggatttgggccttcacaagattgagctgacttgctttggttacaatctgcaaagtcaacgagtcgcggaaaagcttggctttaccctcgaagctcgcataagagaccgcaaagatgctcaaggcaaccgctgtgatgatttgagatacggcttgctaaagagtgagtgggaggtggattgatgcatgttttcatcattggagctccagctgcagggaaaatgaccattggtcaggaactttcgaaactcaccggtgcgactctctttttcaaccatcaacccattgattttgcactcgaaatctatcaggattttacggaagaaatgtgggaatttgttcgtagcgttaacttttcttttcttggaacaagcgccaggcatcatcggtcggtgattttaacaggtgtaactgatttttcaaatcaataccatctgatgtatttgaagaatattcaagatttattaaatgagtatcatcaagagattctctttgttgaattagaaacgtctcttgaggagcgcttacgtcgcaatcgaacggagaatcggttgaaatacaaacccttgaaacggaattttgaggtatctgaaagagaaattttagagactgataaaacaaatcaacttaattctcaaaagcaaccaagtggtcttcactactaccttaaaattgataatacgaatctgtctgcagaagaagtcgcaaagcagattcaagaaaaaatgaaaataatagagaaaggacacacacatgtctaaagaactttcacctaaatacaatccagccgaggttgaggctggtcgttaccaaaaatggcttgatgaagatgttttcaagccttcaggcgatcaaaaggctaagccttattctatcgttattccaccaccaaacgtaactggtaaacttcaccttggtcacgcttgggatacaactcttcaagatatcatcatccgtcaaaaacgtatgcaaggtttcgatacgctttggcttcctggtatggaccacgcaggtattgccactcaagctaaggttgaagcacgtttggctgaagacggcatctctcgttatgacctgggtcgtgaaaaattccttgagaaagtctgggaatggaaagacgagtatgcctcaactatcaagcaacaatggggtaagatgggactttctgtagactactctcgtgagcgtttcacccttgacgaaggattgtcaaaagccgttcgcaaggtctttgtagagctttacaaaaaaggttggatttaccgtggtgaatttatcatcaactgggatccaaaagctcgtacagccctttctgatatcgaggttattcacaaggatgtggaaggtgccttctaccacatgaactacatgttggaagacggttcacgtgcccttgaagtggcaacaacacgtcctgaaaccatgtttggggatacagccgtagcggttaacccaaatgatgaccgttataaagatttgattggtcaaaatgttatcttgccaatcttaaataaaccaatcccaatcgttggcgatgaacacgctgaccctgaatttggtactggtgtggttaaaatcactcctgcccacgaccctaacgacttcttagttggtcaacgtcataacttgccacaagtcaacgtcatgaacgatgatggtaccatgaatgaattggctggtgaattcaacggtatggaccgctttgaagctcgtaagactgttattaagaaattggaagaaatcggtgctcttgtcgaaatcgagaaaatgactcactcagttggtcactcagagcgtacaggtgtgccagttgaaccacgattgtctacacaatggtttgttaagatggaccaattggcgaaaaatgccatcgcaaaccaagacacagacgataaggttgatttctacccaccacgtttcaatgataccttccttcaatggatggaaaatgtccatgactgggttatctctcgtcagctctggtggggtcaccaaatccctgcttggtacaatgctgagggtgaaatgtacgttggcgaagaagcaccagaaggtgacggctggaaacaagacgaagatgtcttggatacttggttcagttctgccctctggccattctcaactatgggctggcctgatgtcgactcagaagacttcaaacgttacttcccaacgtcaacgcttgtcactggttacgatatcatcttcttctgggtgtctcgtatgatcttccaatcattggaattcacaggtcgccaaccatttaagaatgtccttatccacggtcttatccgtgacgagcaaggacgcaagatgtctaaatcactcggtaatgggattgacccaatggatgttatcgagaaatatggtgcggatgctctacgttggttcctttcaaacggttctgcaccaggtcaagacgtgcgcttctcttacgagaaaatggatgcttcttggaacttcattaacaagatctggaacatctctcgttacatcctcatgaacaatgaaggtttgaccttggatgcggcgcgtgaaaatgtagctaaagtcgctgctggtcaagcaggtaatgtcacagaccgttggattctccacaacctcaacgaaactatcggaaaagttactgaaaactttgacaagtttgagtttggtgtagctggacacatcctctacaacttcatctgggatgaatttgcggactggtatgttgagttgactaaggaagtgctttacagcgataacgaagacgaaaaagtcatcacacgctctgtccttctctacaccttggatcaaatcttgcgtctccttcacccaatcatgccattcgtaaccgaagaaatctatggtcaaatctctgaaggaacgatcgtgactgctgaatacccagtggttcgtccagaatttgaaaacgaagaagcagcagcgggtgttgaagctcttaaagacgtgattcgctctgttcgtaactcacgcgcagaggtgaacgtagcaccaagcaaaccaatcactatcttgatcaagacaagcgacagcaagctcgataccttctttaatgacaatgtcaactacatcaaacgcttcacaaacccagaacacttggaaattgcagcagatgtcgaagtacctgacttggttatgtcaagcatcatcacaggagcagaaatctacttgccactcgctgaccttctcaatgtcgaagaagaattggcccgtcttgaaaaagaattggccaagtggcaaaaagaactcgacatggttggtaagaaacttagcaacgaacgcttcgtagccaatgctaaaccagaagttgttcaaaaagaacgcgacaaacaagaagattaccaagctaaatacaatgcgacagttgtacgtattgatgagatgaagaaattggtgaaataaagaaagagacacggcggaatgccgtgtttttttgatataatgattttacatttttgggataggggttgctgtaatgatagaaaatttttcttatgatttccatgaatttgattcgctaattaaattacctaataattcaaaaaaaatagacgagaaaataaatacaatattacttcaattggatagtaaatcagtagatgaaattatacatataacaaaagttagtaatatcgttggagatttaagtttgggaaaaagcagagattataaaaatctattgtttgaaaaaattagctcatttgtagaaaataaatttgacatggataataaattggtatggaagaagttcaaggagcaagttataattttagaccaattatattcagattttattacctctagagaaagttattttaaagaaaatcctacaaaagttgaaattgacttatcgcttattctaatatgtatagaaaaagtcttaagaagttacaatagtaatcatatttttgaggttactaacccaaatgagtcggaatttgaagaaagtgtgcgtatacgagatactttgaaaggatatgcgggtgaaatacttaaatattttatgttttccaagatttccactaggaaatcaaataaaatatattgtagaaaagatgttgatattatatgcaagcattttgaattttatgataattatgaaagtattaaagatgttatggaatattttagattttcacaaattgaaataaaaaaagatccacatttgtatattaatattattggggaagaatttaatagacgtgtattaatttcaaattttcgagagaagggggctagacatagtagatgtgctcatctaattagtaactatagaaaagctagtatagagaaaaaattagactataatgtaaatgattattataatgtgatggaactagaaagaatatttggagaagagtggaagtcttttgaattggacggaatttctattgattattggaataaagcatatttatttgttagaaaaatatccaacaagaagctagttaaggaaaacgatattaaccaattagacaaattatgtattgtaaagagtaagacacaatggatattagaaataaaaaaatctctgaaagtatctaaagatatcgctggaaaaatattagataatttaacatttagtaaggaatcttatgacttaattgatacaccttttattgaattaggagacaatttagcaattattccatcgatttctcaagatactattggtgcatttgctattatttcaaatttttctaagcgattaaataatttgaatgatttatctaaaaaaggttattttctagaaaaaacaatatcatctgtgttgcatgatggaaatctgcgtacaatttctaacctgaaagatagttatcaaggggaaaattatgaaattgatcaaatattcgctatcggagacatcgtatattttgtagagtgtaagactctaccatatccctatactgtgaaagagcatgctgaacaattatgtatgatctacggatatcttaaaaaatttgaaagaaatatagattattttataaggaatagtcacttatttactagcaagttggggatagagagagtccgtgattttaaaaagatttttattacttctacgatgctaggaggagctgataattataatggcatatacattgttgatgaagcttcatttagtgcttttttgcgtagatattctcctgttgcttgggacttttgtagtggtaaaaaaatattcacaaaagatattccttattataatggtgaaataacaaattctaagatgaatcagtttttaaaacgacctgctccgatagatgttatgaaagagagtattagaaaagtaactattaatcacagcttgtgtacaattagccaatattcttttgaaaatcaattagagtatattagtgtagatgatttacctttaattaataagaatgttaattttccttgggttaatctcttaaagtagtttgtagcgattataggagaaatgacatatgtttgtaagattatgagttttgaaaaattctttactttttctgaaatttatatccttatttttaaaattgaagagaggttggtgtttcgctctacattttcgtagtgaaaagttagactaatataattacttaatatagtaagatcgcctaccacgtattataaaatttcagaatcgctttaaaaacgagttatcctcagaggagatggcttttgcgatatattcattagaggagattctattaaaaagttggaagactaaggaagaaaaaaatcaaatgaagattattcgtgagaaatttagtagatttcgcttattcaaagaataatcaagatttaatcaagagtattgaaaagttggtttaccgacctgtgagcgaggtttatattccaatcccagaatcaaatcattttcatgccgagagaccagatttttttggaaaaaatattggtacgtttaaacctggaacaaagaagctcgctctttcaaaagaaaatcgaacatttaagttgagattcttaccatctggggatattattgacgcttatattaaccaagattctgggaaagcaatccagtctatagataaacaggatattcttgggaattggattttgagaggagtctttcaacttgctgaacgagaaatcctaacggctcaacgtttagatgaattagagatcaatggcattcgtctcagcaaattcagaaacggtgaaattggtatagagtttatctggattgatattgataatcctccatcagatgctattggatgggtggcgaataataaataattattttcatattttataaataattcccccttcagctttctttaaggaactcaagttatactatagtcatcctaataagtattactgaacgtcgttcggtagcgctcacttgttatgattttaagtcagacagtgaaactttctttttttcataaatttcccaaacaagtctaacctaccatagttaggcttttttttttttttttgtaataagcagactagtttttcattaaaagtaaacgcttacgtaaaattagtgaaaacgttaggcaaagtcagtgaaaacgtctaaaaaaccatcaattcgttgactttcgtggaaaataggactaaaataacagggtaaaaaaaaattaaaaggagaattctactatgaatctaactatcttagccctcggtttggccgttatgggtgtatctgttggtgagggtatcctcgttgccaatatcgctaaagctgcagctcgccaacctgagatgtttagcaaacttcaaacattgatgtttactggtgttgcctttatcgaaggtaccttcttcgtattgtttgcccttagctacattgtctaatagacaaataaaagatgaaggagggatgagcagtggaaactacaagtaatccaaccgtctcattatttgggattgattttgacttgactgtccttgccatgtctctcttgacagtaattatcgtttttggagtggttttttggtcaagtcgtaagatgaccattaaaccaaagggaaaacaaaatgtgcttgagttcatctatgagtttgtgaatagtaccatttctcaaagtcttgggaaattcacgaagaattatagtttgctcttgtttgtaattttcacctttgtttttacagcaaacaacttaggtttgcttgtgtctgtaaaaagtgagcattacaatttttggacttctccaacatcgaacttcggtgttactatcactctttctttgattattaccctcattagtcatattgaggggatccgtaaaaaagggtttaaaggctatctaaagggctacctttcaccatacccagctatgctcccaatgaacattttggaacaattaaccaaccctgcttcattggccttgcgtttgtttggtaacatttattctggtgaggtacttactggcttgattcttcaattggtgacctggtctgcttttgcagcacctgtatcctttgctttgaaccttgtctgggttgccttttcagcctttatcggctttatccaagcctatgtctttattatcctaagttcaaactatattggtgataaagtcaacgaagaataattaagaaagggagaaatgaaatgtcaatacttattaatagtacgacacttggtaatatcattatcacactcggctcagtttttctcttgtattacctcatccgtaaattcgcatgggatcaaattacaggaatctttgctgctcgtgaaaagaaaattgccacagatattgatagtgctgaaaatgctcgtcaagaagcagaaagcttggcacaaaaacgtcaagatgagttggcaggtgctcgcactgaggcagctcaaattattgatggggccaaggaaactggtaaaactcaagaatcaaaaatcattgcagaagcacatgatgaagctaaacgcttgaaagaaaaagcaaatcaagacattgcccaaagccgtgtggaagcacttgctggcgttaaaggtgaagttgcagacttgactgtcctcttggcggaaaaagttatgaaacaaaaccttgatgctaaagcgcaatctgacttgattgatagctatcttgatcaattaggagatgcttaatggataagaaaacacaagctcttgttgagcagtatgccagaagcctggtagaagtcgcttttgaacaagacgccgtgtcaacaatccaagaagaagtaaggcaaatcctaacagtttttgctgaaacaaatctaaaaaccttcttgtcgcaggaaaatgtgacaagtgaagctaaaaaagaaagtttgagcttgtttcaagagtcttgttcagtgtatatgaacaattttcttgaggtaatcttactcaatgaccgtgccaacattctctatgatgtgttgaaattggtccttgagctctttgaccaagaagacaatagttacgatgtcacagtgacatcagcaagtcccttgtctgaggaacaaaaagcccgacttttggcgattgtttcacaaaaatttgagattaagacacgtcgtttagtagaaaaaattgatgaggacctcatcggaggattcgtcatcaaagcaaaaaataaggttgttgacacgtcaattcgcagtcaattgcaaacctttaaaacgaatttgaaatagaaagtggtgtgacttttggcaattaacgcacaagaaattagcgctttaattaaaaagcaaattgaaaacttccagccaaactttgacgtcactgaaactggtgtcgttacctatatcggtgacggtatcgcacgtgctcgtggtcttgataatgccatgagtggtgagttgctcgaatttgaaaatggtgcctatggtatggcccaaaaccttgaatctaatgatgtcggtatcattatcttgggggatttcgtagcaattcgtgaaggcgatattgttaaacgtactggaaaaatcatggaagttccagttggtgaagcccttattggtcgtgtagtaaacccacttgggcaaccagttgatggtcttggtgacatcgaaacaacaggtttccgtccagttgaaacacctgctccaggtgttatgcaacgtaaatcagtttctgagccattgcaaactggtcttaaggccattgatgccttggttccaattggacgtggtcaacgtgagttggtcatcggagaccgccaaactggtaaaacttcagtagccattgatgctatcttgaaccaaaaaggacaagatatgatctgtatttatgtggctattggtcaaaaagaatcaacagttcgtacacaagtagaaactctccgtaaacatggtgctcttgattacacaatcgttgtgactgcctcagcatcacaaccatcaccattgctttacatcgcaccttacgctggtgttgcaatggctgaagagttcatgtataacggaaaacacgtcttgattgtttatgatgatttgtctaaacaagccgtggcctaccgtgaactttcattgcttctccgtcgtccaccaggtcgtgaagcctacccaggggatgtcttctatctccactcacgtcttttggaacgttcagctaaagtttcagatgatcttggtggtggttcaattactgccttgccaatcatccaaacgcaagccggagatatctcagcttatatcgcaacaaacgttatctcaatcacagatggacaaatcttcttgcaagaaaacttgtttaactcaggtattcgtccagccattgatgcgggttcttccgtatcacgtgtaggtggatcagcgcaaattaaagcgatgaagaaggttgctggtacacttcgtcttgacttggcttcatatcgtgaacttgaagcctttacgcaatttggttcagatttggatgctgcgactcaagcgaaattgaaccgtggtcgtcgtacaatcgaagttttgaaacaaccgcttcataaaccacttccagttgagaaacaagttgttatcctttacgctttgacacacggtttcttggatagtgttccggttgatcaaatcttggattttgaagaagcactctatgactactttgatagtcaccatgaggatatctttgaaactattcgtacaactaaggatattcctgaggaatctgtacttaatgaagctatccaagctttcaaagatcagtcagaatacaaatagaaatagggaggacagcatatggcaggctctctaagagaaatccaagcaaaaattgcttcaacaaagaaaacgagtcagatcacaggagccatgcaaatggtttctgcatcaaaattgacacgttctgagcaagctgctaaagatttccaaatctatgcctcaaaaattagacagatcacaacagatcttctacattcagaattaattaatggttcgtcaaatccaatgttggatgcacgtccagttcgtaagacaggttacattgtcattacttcagataaaggacttgttggaggttataactcaacaattcttaaagctgtgttggacatgattaaacgtgaccatgattctgaagatgaatatgctatcatttccattggtggaacaggttcagatttcttcaaggctcgtaacatgaatgttgcttttgaacttcgtggccttgaagatcaacctagttttgatcaagtcggaaaaatcatttctaaagctgtaggaatgtatcaaaatgaactttttgatgaactctatgtgtgctataaccaccatgttaacagtttgtctagcgaagttcgtgtggaacaaatgcttcctatcgctgatttggatcccaatgaatcagaaggtcatgtgttgaccaagtttgaattggaaccagatcgtgacactattttggatcaactcttaccacaatatgcggagagtcttatctacggtgctatcgtagatgccaaaacagctgagcacgcagcgggtatgactgcaatgcagacagccactgataatgctaagaatgtgattaacgatttgacaatccaatataaccgtgcgcgtcaagctgccatcactcaggaaattactgaaattgttggtggtgcaagtgcacttgaatagctagagatttgtcttaattagacacacatgaaaaagggatgattgtcatccaaaaaactatcataaggagaaaacaatgagctcaggcaaaattgctcaggttgttggtcctgttgtagacgtagcgtttgcagccggtgataaactccctgagattaacaatgcattggtcgtttatactgatgaacaaaagtctaaacgtatcgtgctcgaagtagctcttgaacttggagaaggtgtggttcgtaccattgccatggaatctactgatggattgactcgtggactagaagttctggacactggtcgtccaatcagcgttcctgttggtaaagatacccttggacgtgtctttaacgttcttggtgataccattgacttggaagcaccttttgcagaagatgcagagcgtgaaccaattcacaaaaaagcaccaactttcgatgaattgtcaacatctactgaaatccttgaaacagggattaaagttatcgacttgcttgccccttaccttaaaggtggtaaagtcggactctttggtggtgccggtgttggtaaaaccgttcttattcaagagttgattcacaacattgcccaagagcacggtggtatttccgtgtttacaggtgttggtgaacgtacacgtgaaggtaatgacctttactgggaaatgaaagaatctggcgttattgagaaaacagccatggtcttcggtcaaatgaacgaaccacctggagcacgtatgcgtgttgcacttactggtttgacaattgcggaatacttccgtgatgtcgaaggtcaagacgtgcttctcttcatcgataacatcttccgtttcactcaagcaggttctgaggtttctgcccttcttggtcgtatgccatcagccgttggttaccaacctacacttgctactgaaatgggtcaattgcaagaacgtatcacatcaactaaaaaaggttctgttacatcaatccaagccatctacgttccagccgatgactatactgacccagcgccagctacagcatttgctcacttggattcaacaaccaaccttgaacgtaagttgacacaaatgggtatttacccagccgttgacccattggcatcaagctcacgtgccctttcacctgaaattgttggtgaagaacactatgctgttgcgactgaagttcaacgtgtgcttcaacgttaccgtgaattgcaagatattatcgctatccttggtatggatgaattgtcagacgaagaaaaaacattggttggacgtgctcgtcgtatccaattcttcttgtcacaaaactttaacgttgctgaacagtttacaggtcaaccaggttcttatgttccagttgctgaaaccgttcgtagctttaaagaaatccttgaaggtaaatatgacaatcttccagaagatgccttccgtagcgtaggtccaattgaggatgtagtagctaaagctaaagctatgggctactaatgaggtgaagatatggcacaaatgaccgtacaagtggtaactccggatggtctgaaatatgaccaccatgccagctttatccacgcggttactaaagatggtcaaattggtatcttgccaggccatattaacttgattgcgccacttgaagtggatgaactcaaggttcgtcgtgtggatgacgagagtcacgtcgattggattgccgtaaacggtggtatcatcgaagttaaagatgattttattactatcgttgccgattcagcagaacgtgaacgcgacattgacgtttctcgtgccgaacgtgccaagcaacgtgccgaacgtgacttggaagaagcaactaaatctgaccgtattgatgaagttcaacgtgctcaggttgctctccgtcgagcacttaatcgtatcagtgtcggtacaaaataagacaacaaaaaacggctctttgtcaactgtagtgggtgacgaaaagctaacatctagagaggaccagataggtcttctctttttgtatattcagagtgatgaaaacacgcttcctaaagttgataaaatttttaaaaccgaagcccagacgtttaatatctttgataagcttattggtcccctccaattttgcatttgagtaatgtgtttctagtgcatttttgatgtattgtttatgtttacgaaaagtcctaaagactgttttgaagtaatgattgaccttgcttatattctcctctatgagttcaaaaaactcatcccctctcttctcctgaaagtgaaaaagcaaaagctgatagaggttataataattggtgagttcttctgagaaattcagtgtcttctcaacgacttcatgtgggcataatgtttgatggaaggtctttgagtaaaaagggttgagagataacttacggctgtccttttggaagagtctccagtgattttttaaagctcgataaggtagcgacttcttatcaaactggttcataatcgcaattcttgtctttaaaaaggctcgaccaaggtgctgaataatgtgaaatcgatcaagaacgattttggcgtttggaaagagcttgcgagccagtggcatataagctccagacatatccatagtgataaactgtacctgttgtcggactttcaatggatacttcaaaaagtagtttcgtatagtagtttggcagcgattatcaagtatagttatgagttcgtttgtctcatagttctgtgccacaaaagccaattcccctttcttgaagccaaactcatcccaggacataatagctgggagtttgtcataatgttccttgaaagtaaactggtcgagtttacgatagacagtggacgttgacacgcgaagtcttctggcaatatccgttaatgacaccttctcagttaggagttgtgtaaccttttgtcggactagattggagatttggcagtttttctcaacgatagatgtctcagctaccgtgactcgtctacaacttttacactggaaacgacgttttttcagacgtagtagtgttggagttccagcttgctcaagaagagggattttagaaggcttttgaaagtcgtacttgatcatctttccatggcaatgaggacatgatggtgcaggggaatcgagttttgcttgaatctcgatatgagtatcagtttcaaaaacaagtgaaatattgatattttggtctttaattccgattaattctgtggtattcttaataagtctcataagttcttcctaatgatggtttggttgcttttcattatagttcttatgggactttttgtctgcattcaaaaagctctataatctctacagtagttttacccactacagaaattatagagcccaaaaaacgagactttggtcccgttttttatttgtcgtaaaagaaaacatgagaagtagcaaagttatcaaagaaagttcattgtaaaacctatctgaaggtaagataaaaaatcagatttccagtcctgaaaacggttaatttagcttttactttagtttaaggtatcaaagtgttataatataagctgttagctttatattttaagagaaaatgtagagtaacgtaatagaaagtatgagttttttaaagatatgaaaattgaaaagaagcatcttttagattacaccatcttgataccttatttaatcttatccatagttggtttaatagtagtgtattcaacaacaagtgctcgtttagtagccttgggagccaatcccttcgcatctgttataaaccaaggagccttttggttggtatccttgttctctatttttttcatctaccgactgaaattgaactttctcaggaaagataagcttttgggtgttgttattgcctttgagattttacttttggtcattgccaaatttttcaccagggaaatcaatggtgccaatggttggattgtgctaggtcccttgtctttccaaccagcggagtaccttaaaatcattgttgtttggtttttggcacacaccttttcaaaaaaacagtctgccatagaacgttatgactaccaagccctgacgaagaatagatggattcctaggaatggtaaggaacttaatgactggcgtgtctatttgcttgtaatgatcggtttggttgctatccaacctgacttggggaatgcggctatcattgtgttgactacagtagtgatgttttcaatttctggtgttggctaccgttggtttacggccttgtttgccagtattgttgggatttcgtcagccttccttgggttaattgccttggttggggttcaaaccatggctaaggtacctatctttggatatgttgccaagcgtttcgcagcatattttaatccgttcaaggatttgacaggatctggtcttcagctatctcattcatactatgctatgagtaatgggggctggttcggccttggacttggaaattcgattgaaaaaactggttatctcccagaagctacaacagactttgtgttttcaattgtaattgaagagttaggtcttatcggagctggcttgattctggccctcctctttttcctcattcttcgtgttatgattgtgggagtcaaggcacgaaatccttttaactctatgatggcattgggtgtaggtgccttaatgctaatgcaggtcttcgttaacatcggaggaatctcagggctgattccatcaacaggggttaccttccccttcctttcgcaaggaggtaactctcttttagtgacttcagttgggatagcctttgtcttgaacatcgctgctaatgaaaagcgtgataatattgttcaagcgattgaggatgagttatctcagactcaagaattggaaaatcaagatgaaaaaatcgtgcctttaagaagaagtcgttaatacggcttcttttttcgttagatggtgttaggcagtagtatgaagatagtgaaagctaataggagcagtagaaatagaattattgaaaggaatatttgtaattactctaaagaaaaactgaaaactatataaaatacttgcaattctatgacattttgatagaatagtagagtaaagttagactgtattgcctactgtctatctataaaatatattttattggaggcttttcctaaatggcaaaagaaaaatacgatcgtagtaaaccacacgttaacattggtacaatcggacacgttgaccacggtaaaactactttgacagctgctatcacaactgtattggctcgtcgtcttcctagcgcagttaacacaccaaaagactacgcttcaatcgacgctgctccagaagaacgtgaacgtggtatcacaatcaacactgcacacgttgagtacgaaactgaaaaacgtcactacgctcacatcgatgcgccaggacacgcggactacgttaaaaacatgatcactggtgccgctcaaatggacggtgcgatccttgtagtagcatctactgacggaccaatgccacaaactcgtgagcacatccttctttcacgtcaggttggtgttaaacaccttatcgtcttcatgaacaaagttgacttggttgacgatgaagaattgcttgaattggttgaaatggaaatccgtgaccttctttcagaatacgatttcccaggtgatgacattccagttatccaaggttcagctcttaaagctcttgaaggtgattctaaatacgaagacatcatcatggacttgatgaacactgttgacgaatacattccagaaccagaacgtgacactgacaaaccattgttgcttccagtcgaagacgtattctcaatcactggtcgtggtactgttgcttcaggacgtatcgaccgtggtgttgttcgtgtcaatgacgaagttgaaatcgttggtcttaaagaagacatccaaaaagcagttgttactggtgttgaaatgttccgtaaacaacttgacgaaggtattgccggagataacgtcggtgttcttcttcgtggtatccaacgtgatgaaatcgaacgtggtcaagtattggctgcacctggttcaatcaacccacacactaaattcaaaggtgaagtttacatcctttctaaagaagaaggtggacgtcacactccattcttcaacaactaccgtccacagttctacttccgtacaactgacgtaacaggttcaatcgaacttcctgcaggtactgaaatggttatgcctggtgataacgtgactatcgacgttgagttgatccacccaatcgccgttgaacaaggtacaacattctctatccgtgaaggtggacgtactgttggttcaggtatcgtatctgaaatcgaagcttaattaatattaagttcccaatacaattattcgtcagacaataattgagagagtcgagtttactcggctctttttggtgtttaaaaatacttgtgattttatacttttaaggtattttagatgcttaagctaagttttgatagtgataaatagacataaagcaggttgagttttcggaattttcctaaaatcctagtaatagtaagggatttgtgataaaataaacgagtaaataaataaaagaagaggtatgtgaaatgtcacgtaaaccatttatcgctggtaactggaaaatgaacaaaaatccagaagaagcaaaagcattcgttgaagctgtagcatcaaaacttccttcatcagatcttgttgaagctggtatcgcagctcctgcagttgacttgacagctgtacttgctgctgctaaaggttcagaccttaaagttgctgcacaaaacacttactttgaaaatgctggtgccttcactggtgaaactagcccacaagttttgaaagaaatcggtactgactacgttgttatcggtcactcagaacgtcgtgactacttccacgaaactgatgaagacatcaacaaaaaagctaaagcaatctttgctaatggtatgcttccaatcatctgttgtggtgaatcacttgaaacttacgaagctggtaaagcagcagaattcgtaggtgctcaagtttcagctgctcttgctggattgactgcagaacaagtagcttcaacagtaatcgcctacgaaccaatctgggctatcggtactggtaaatcagcttcacaagacgacgcacaaaaaatgtgtaaagttgttcgtgacgttgtagctgctgactttggtcaagaagttgccgacaaagtacgtgttcaatacggtggatcagttaaacctgaaaacgttgctgaatacatggcttgtccagacgttgacggagctcttgtaggtggtgcatcacttgaagctgaaagcttcttggcattgcttgacttcgttaaataattttagataaagtcgaggtttccctcggcttttttcttgtttgtcttaagtgtttttctaaaaaaagccaggtttctcttatcctgttttggggagcaaaggtgcttaaatgtagaacaaaaactcctattttgtaagccctatctttttgtttggattttttaaaactttgagcctaggcaagtacaattggattgtcccaagaggcagataatatgctataatgagaatagtataactagagcgcaggcactgatagtctgtatgctccgcatttttccaagaagaggagaattagaaatcatgacttttgatgcaattgaccaaatggcggtcagcactattcgttcgctttcaatcgaggccattcaagccgcgaattctggacacccaggtcttcctatgggtgcagcgccaatggcttatgtactttggaaccatgtgatgaatgttaatccaaagactagccgtaactggacaaaccgtgaccgttttgttctttctgcaggtcatggttctgccttgctttatagtctcttgcacctttctggctacgacgtgacaatggacgacttgaagaacttccgtcaatggggatctaagactccaggtcaccctgaagttaaccatacagatggtgttgaagcgacttcaggacctcttggtcaagggattgctaatgctgtaggtatggcaatggctgaagcgcacttggcagctaaatttaacaaacctggttttgatattgttgaccattatacttatgccctccatggcgatggttgtttgatggaaggtgtttctcaagaagctgctagtcttgctggtcaccttaaacttggtaagttggtacttctttacgattcaaatgatatctcacttgatggaccaacttcaatggctttcacagaagatgttaaggctaagtttgaagcttatggttggcaacacattcttgttaaagatggtaatgatttggaagctattgctaaagatattgaagaagctaaggctgagacagataaaccatctattatcgaagttaagacaatcattggttacggagctgaaggccaaggaacatcagctgtccacggtgctccaattggtcaagacggcattgatcacgcaaaagatgtttatggttatgatgccccagcctttacagttccagatgaagtcgctcgtcgtttcgaagttggtattaaattccgtggtgaagctgctgaaaatgcttggcaaactaaatttgcagaatatgaagctgcttacccagaattggctgctgaatacaaagctgcctttgcgaatgaacctgtacacgttgacttgaatgctcatgaattgggttcagcagtagctagccgtgtgtcaagccaacaagctatccaacagatttctgaacaagttccttcattctggggaggttcagcagacctttcagcttctaacaatactatggttaaggctgagtctgatttccaaccagacaactatgctggacgtaatatttggttcggtgtacgtgagtttgctatggctgcagcgatgaatggtattgctcttcatggtggtactcgtgtttatggtggtactttcttcgtcttctcaaactacttgcttccagcagtacgtatggcagcacttcaaaacttgccagtaacttatgttatgacacacgactcagtagcagttggtgaagatggacctactcacgaaccaatcgaacaattggcaagtgtgcgttcaatgcctaaccttaatgttatccgtcctgcagatggtaatgaaactaatgcagcatggaaacgtgccttggctgagactgaacgtccaacaatgctagtcttgacacgtcaaaacttgccagtccttgatggtacagctgaaaatgctgaaactggtgtcaataaaggggcttacatcatctcagaagctaaaggtgatcttgatggtatcatcattgcgacaggttctgaagtgaaattggctcttgatactcaagcggctcttgaagctgaaggcgtgcatgtccgtgttgtttcaatgccatcacaaaatctctttgatgaacaagatgctgcatataaagaagaagttcttccagcagctgtgacaaaacgtttggctatcgaagctggaactagctttggttggggcaaatacgttggtcttgcaggtaaaacacttactattgatacttggggtgcctcagcacctggtgaccgtatctttaaagaatatggtttcactgttgagaatgcaagtcaactttacaaatcattgtaagaaaagaaagagcttggctcgtccaagttcttttttcttgtaaaaagtgtttaacttcacacagtgcttgacttttgggtctagagtgctagaatgactgtgttagccgatttagctcagttggtagagcaacgcactcgtaacgcgtaggtcacaggttcgaaacctgcaatcggcatggtcataggtgttcacatattaaaggggaggttttagaaacctcttttttctttagtcctagattgttaatttaagctaaaatttgataaaataaaaggtaaagaaataataaaggaagtatcatgtcaaaagggttattaatctcaatcgaaggaccagacggtgctggaaagactgcagttttggaggcacttttgcctcgtcttagagaagcctatccagccaaagtcgtaacgacacgtgaaccaggaggagtagccattgcagagcaaatccgtgaggttattctggacgtaaataatacggctatggatgctaagacagagctcttgctctatattgcggctcgccgccaacacttggttgagaaggttttgccagagcttgaaaaaggcaatatggtcattatggatcgttttattgattcatcagttgcctatcaagggactggtcgtggcttgaatcaggatgagattgcctggttaaatacctatgcgactgatggttataaacctgacgtgaccttgttatttgatgtggattctgaaactggtttggcccgcattgcagccagcggtgaacgtgaagtcaaccgcttagatttagagaagcttgacttgcatcagcgtgtacgtcaaggttatttggatttggctaaggctgaaccagaacgtatcaagttaatcgatgcctcacaggcttttgaagatgttgtagagcaagcttggaaagtaattgaaggctatttataaggagcaagatgaagttagctgaaagtcaaagcaaactgtttgaagagttttcacaaattatcagggaaaatcgtttgagtcatgcttatttgttttcgggtgattttggaagtctcgacatggctatttggctagcgcagagtcggttttgtgtgactcctgagaatggtcttccttgtggtcactgtcgtccctgtcgcttgattgcacaaggggatttttctgatgttaaattcgtagaaccacaaggacagattattaagacggacacgattcgtcagttgaccagagagtttagtcaatctagctttgagggacaggctcaggtttttatcattcgagatgctgacaagatgcatgtcaatgctgcgaatagtctcttaaagtttattgaagaacctcaaagtcagatttatatttttcttttgacagctgatgatagtcatatgttaccgacgattaaaagccgagctcaactcttttattttcctaagaacagagtttatctggaagacttgctgcagaaggaaggtttgttattgacacaagctaaggtcttggcagattttgctaaggatgaagcacaggcttttgagttagctaaggataataaggttcttgatttggtcaatacagtggagcgtttttcacagtctctgctggctaatcaggacctgctttatctggatgttgcaaaactggctgtccagtgtagtgaaaagtcagaacaagagatggtctgggcttttttaacttatcaattggggaaggatatacaaaatccacaagcaagacgatggctagacttagtatatgaggcacgaaaaatgtggctagctaatgtcagctttcaaaatgcgatggagtatatggtgttatcatgactgaagtcattggaataaaatttgaagaaactggtacaatagaatatgttgtacctgatagaaattatgccaaagatgactttgtagtcgttttggataaaaaggataagcgtctggctcaggtcgttgtggagaatacaaattttcctgaagttagtttgcctactgatttgaatcgagttgaaggcctagccggagagagggattttgccagatatgatgaaaatcttttgaaggctgaaaagagtatgtctgtggtggctgatttaatcactcaaaatcaactagatatgaaagtggttgacatcgtttttcctctaaatagctcttatgtactgattagttttgtggctgaaaagagagtcgattttcgtcagttgctcaaggatttggcagcttactttaagacacgcattgagttgcgtcaaatttcaagtcgtgaggaatcaaagatttatggtggtttaggaccttgtggacgtgcactttgttgttctagctttttgggtgaatttccaccggtgtcgattaagatggctaaaaatcagagtttgtccttgaattctggtaagatgaatggtgtctgtggccgactcatgtgctgtctcagttatgaagatgatttttatagagaaagcaaggctaattaccctgacttgggacaagaaattgaaaccaaggatggaaaaggtcaagttgttgccattgatgtgattgcagggactattaaggttgtgtttgaaaaagggcgtgcgcccctaatttatggagtggaggaagttcagctaaatggaaaagcgtgaattgtatgataagttcgaagaattatcacaaaatttgatgtcaatgttggcagaagtagaagcaattaaggcgaacttctcaggaattcttgatgagaatacagcccttaagttggaaaacgacaagttgcgtgagcacttgagtcaagtggttcaagaggagacaggaactaagatgtctcatggcaaggtgaacctcgaggccatttatgatgatggattccatatttgtccagatttttatggtcaacgtcgtgataataatgaggcttgtggcttctgtgcagaattgttgtacggagattaagcatgcaggttcaaaagagttttaaggggcagtctaactacggtaccctctacctggttcccacacctattgggaatttgcaggatatgacttttcgcagtgttcaaatcttgaaagaggtagaccttatttgtgcagaggacacgcgcaatacgggtctcttgctcaagcattttgagattgaaaccaagcagtattcttttcatgagcacaatgcctatgagaaaattccagatttactggagcgtttgaagtcaggtctttctttggctcaggtttctgatgcgggtatgccttccatttcggatcctgggcatgatttggtcaaagccgccattgctgaggatattcctgtggtggccttaccgggagcatcagctggtattacagctttgattgccagtggtttagcaccgcaacctcatattttttatggcttcctgccgcgtaaaaagggacagcagattgatttcttcaaggaaaaagtatcttatcctgagacacagattttttacgagtcaccataccgtgtggcggatacccttgaaaatatgcatgaggtctatggcaatcgtcaagtaacgctagttcgagaattaaccaagctttatgaagagtaccagcgagggtcaatttcagaaattttagattatattgctagtaatcctctcaagggagaatgtttactgattgtggctggagcttctgaaaatgatagggaagaaaatctaacatcagatgttatgccagtggaggctgttgaagttttaattgcttctggcatgaaacctaatcaggctataaaaaccgttgctaaagagcgaaaaataaacagacaagagctttataacctttttcatggggtttaaggggctctttttttgtggcgacataagatgtcagaaaagaaagaattatcaaaaaattccgtaaatatgcttgtttatctcatatttttgtgttatattatctgacatagaataatttgtgaattggagtggtttcatggatacaggtagcagtgcctttatattgatttgttcagccatggtttgtttgatgacaccggccttggccttcttctatggtgggctcggacgtcgtaagaatgttatcaataccatgatgatgtctgttcttcccttagccatagcttctctcttgtggattgttgctggctattcgctttcttttggcggtcatgggaatatattcggtaatttcagtcactttttttttaatggcgtttctgaaactgcctcaagtcgtggtctaaccattcctgatatgctgtttgctgcttttcagatgatgttttcgattatctgtgtggcgattttgacgggttcagtagtaggaaggatgcgctttacgcctttagccatctttgttgtcttttggttacttcttgtctactatccatttgcacatatggtttgggacgaagggctccttgctaaatgggggacgattgacttcgcaggtggtgatgtggttcatattacctcgggggtatcagccttggttttggcaatcgttgttggtaaacgtcgtgattttggcattttagaacaccgtcctcataatgttccttttgtcctattgggagcgggtctcttatggtttggttggtttggatttaatgcaggatcagccttggctgctaatggcttggcagtgcacgcgctagtaaccacccatgtttcagctgctgcagccatgttttcatggttggcaattgaaaaacatgtcacaggacatccatccttggttggtggttcaactggtttggtggctggtctggtagccatcacacctggagctggttttgtttcaatttggagtgccatcctaataggggctatggttagtccggtctgtttctatgctatttctgtcttgaagaaacgttttgcctatgatgatgctttggatgcttttggttgccacggtgttggaggtatctttggtggtctggttacagctgtttttacaacacctgatttagctttagataaggccaatattggtttgatttatgggaatgctcatctatttcttgtgacagtcttggctattatttttacagctgtttggtcagggctagtaagctatggtattattaaagtgattgcccgttatatgcctttacgtgttagtgaccgtgatgaagctattggtcttgatgacagtgagcataaggaaacagcctatccaacctttatgggcttagattcgtaggagaacatagatgaaaaaagtagaagcgattattcgttcggacaaattggaagatttgaaaaatgccttgactggtagtggcttggcaaagggaatgactgtaagtcaggtcttaggttatgggaaccaacgaggctttgcggagtttgttcgtggacaacgcattgttccaaccttactagctaaagttaaggttgaaattgtagtcaaagatctagcggttgacgaggttgttgatgccattcggaacgccgtggcgactggagatgttggtgacgggaaaatcttcatcattcccattgatgatgttatccgtatccgtactggtgaacgtggtggagatgcaatataggattaatagagacttaaaccagttggtttgggtcttttttagtgatttttgatatacttaggagagttagtatgatttgagggggtgaccgattggcgaaaggaaaaaagaaaagtaagtctaaagctagacctaagaaaactaaaaagaaacagaagtctttcttgctctttcctaaatttttccaaaagtggagtctgatttttatcggcctatttgccttattgggactcctagctagtttaaattttccaaggttgaccatggaaaagaacatgacgtctacggatgagacgacggttgcttttattgctgagattggtgagacgtcgcgctatttggcagctagaaatgatctttatgcatctgttatgatagctcaggccatcttggaatctgactctggacaatctactttgagtcagaagccgtcctataacttctttgggattaagggggactacaatggtcaaagtgtgaccctaccgacctgggaggatgatggtaagggcaatccttactatattgatgcggcttttcgttcttatggttctgtggaaaattctttacaggactatgtggatttccttgagggaagctactatgtaggggtgcaccgttccaagactaagaattataaggatgcaacagcagccctaacaggggtctacgctacggacacaacctatggagacaaattaaacagcatcattgaacaatatcagttaaccatttatgacacttattagggtcgaaggagagtaaaatgaatcagaaccaagtgaaactcattgcaatagatatggacggaacactcttaaatagccaaaaagagatccctgaagagaatattaaggctattcaagaagcagctgcggcaggcgttaaaattgtcctttgtacaggacgaccacgctcaggtattcttccacattttgagaaattggggcttagtgaagaagagtatattatcatgaacaatggttgttcgacctatgagacaaaacattggaagctgcttcaatatgagagtttatctcgcactgagatggaagaactcttgcaagcttgtgaggattttccagaggtgactctaaccttgactggtgagaagacttactatgttgtgggcgatgaggtgcctgagttagtagcttatgatgctggcactgtcttcacagaagcgaaagctaggagtttggaagaaatctttgcggaagggcaagtgattttccaagccatgtatatggcagattctgaacctttggacgccttccaaaacgccgtgcaagatggacttagtcagagctatagtacagttcgtagtcaagactatatctttgaaattatgccacaaggggcaacaaaggctagcgggcttaaacatttagcagaaaagcttgaaattgccccaaatcaaatcatggctctgggcgatgctgctaatgaccttgaaatgcttcaattcgtcggtcaaagcgttgccatgggtaatgcgagtgacgacattaaggctttgtgtaagtatgtgactttgacaaatgacgaggcaggtgtggcacacgccattcgtacttgggctctttaagaaaaagacctttagctttattgtttgctaaaggtttttcgatttctgataatggcaatgagagtagtaagtgtgatagtgacatcagtgatggcagctgggtaagcctgaatggtcaaatcgtaaatcagccaaagtaacatattttcaataatgacccagcgaagccactgaaggtttcgtgtgatggcaatggctaaactataagagatgattggcagatagccaataagtccaagttgattgagataggttcctacaatgatttgaataacgatgaggatggtcaagatagtcttggtcatcttctttttgaccatcaagctattacgtatgatggaaatactaatggttaaagcaccggtatagccacccaataagaggttgtcaatagcagtaaaaatgtagtcggtaatttgccagacgagcattttatgttttgattttgcaaaagaggaaatagcgacacagagagctccgatggctgagaatacttgtgctagaagatagattgtcatgatataactttcaatttttgtctccattatatcacaaggattcaagagattttcatctcttttttagaatttacaatcctaatatgttagcgtttacattagaaaatgatataataaaagtgtagaaaagattattcccttaaaagtagagagaacccaatgttcccttgtgacataggtcctatctttactttttacgatagactagaaatgaggaaataattatgaaaaacaaattttctcaagcaatcgtgctttccatggttaccctttcctcaatggctttgctgacggcctgttccagccataaggaatcgagttcagcagataagacgcctaagagcagccaggtgacctcatcaagtaaggatgaaacatccagtaaagatagcggtaaggctggcaagtcgagtgctaaggtcaaggaatcttcgggttcaaagacggaatcttcaagcacgcaaagtagtcaaaaggcttctgccccaagttcaagtagcagtcaggctcagtcatcatcttcaaagagttcatcagttccctcaagcagtcagtcccaagctcctaaatcttcaaacgagagtcagtcttcagccagtcaatcccaagtgccaaagagctcaagtgatagtcaagcttcaagtagtcaatctagcagtcaagctcaagctaaaacggatatgcaagtaaccaccgtggatatggatgtgagtgctgtagcgcgtggtcagtttgatagtattgctggtacttggaagtccagtgatggcagtcgtctggtctttaacaacactagcctagtaggagatatcactgcccaaggtcaagcgacagttcacaattatgtgcacccgaaagataattatcaagagggctcaggtaagtatgatgccaccctctcaagagatagaggggacacttctggtattgttggagatattagctttgtctctaaaaaggcagctatttctggtcctagctatgaacaagataccattcaagtaaccagtactgatggaacaaaggtctactttaaagaatcagataatgtgacactacctaaagacgtgactgttactgacaatcaacttccaattgatggtggtatatcagaatctggtagctacacgcttaccagacgtacggctgtcaaaaatactcctagtgatacagctccagttgaattttacttagaagcaggcgataagattaactttgatatgaaggttactcaagacggtcatagttggatttcttacatcagctatagtggcgttcgccgttatgttcaagtggactaaatgagacatctagaaaggtcagattttcttctgatctttctattattttatggaaaaagtcttgtctattccctaataaatagatacaatagaaaggtcggttttaccgaaaatttttaaataatgaggacaaaaatgtgtcagtaaattggcaagatattgcgttttctttcctcggtggtttggggcttttcctcttcagtatcaagtacatgggagatggtcttcaacaagcagccggagataagttgcgcttttacatcgataagtataccagcaacccgtttttaggggttttgattggtattgtcatgacggccttgattcaatcgagttcaggggttaccgttattgtcgtcggtctggtttcggcagggctcttgagtcttcgtcaggctattggtattgttatgggggcaaatatcggtacaaccgtaacttccttcatgattggtttcaagcttggtgactatgcccttccagtgattttcctgggggctgcgcttctcttcttcacaagcaataagaagctcaataacctaggtcgtatcttgtttggtgtaggggggattttctttgcccttaacctcatgggagatgcggttgagcctttgaagtcagttacagcctttaaagactacttggcaacactcggtaatcgtccaatcatgggagttatcattggtgctggcttgaccatgttgattcaatcgtcagcagcgaccatcggtattcttcagagtctctactcaggtggtttgcttgacctgcaaggtgcccttccaatcctctttggggataatatcgggacaactatcacagcggttctagctgctcttggttcaaacattgcagctaaacgtgtggcaggggctcacgtattgttcaacgtcattgggacggtcttgtgtttgattctcttggtgccattcacagccttgattcaatggtttaagtctgtgcttggattgacacctgagatgactatcgcctttgctcacggtacttttaacatcgcaaatactattgttcaattcccattcatcggactcttggcttaccttgtgactaagattattcctggtgaagatgagattaacaagtacgaagcactttacttggaccgtttgcttatcacacaagcaccagctatcgcccttggtaatgctaagaaagaattggtgcacttggcatcgtacgccatccagtctttggaagcttcctatgctttctttgctaagggagatgaaaaatacttcgataaggttgagaagtatgaaacagcagttaatagtattgacgaagagttgacaacttatttgattgacatctctaacgaatctctaagcgtttctgaaaatgaagtgttggcaagtgtgcttgactctgttcgtgacttggagcgtattggtgaccttgcagttgcaagtgcaaacctttcacaacacattcataataagggaattgaattttctgatactgccaaggctgagcttgcggatgtttacaaccgtactcaccgtatcgcccttgatagtattcgtgttgttgtagatgacgataaggtacttgcaggtcaagtcatccttcgccatgaagagttggaaaaacttgaaaaacaattgcgtaaaatacataccaaacgtcttaacaatggtgagtgtactgcgcaagcaggtatcaactatgttgattacctctcacattacacacgtatcgcagatcatgcgattaaccttgttgaaaaggttacagaaggtgtgatttaatagagaaagtcgagaaaatttctcggcttttttgttataatgaaagcgtattaaaaacatagaaaaatgatgagaggtggtcctatgacctattatatttcagccaagcgtttttattttgaacataaaattaaggaaggtggctacctagcggttgaggatagccgttttggtgactggacggaaaatgtaccagaaggtgcagaggtgctagattacagtgattatcagatttctccgggtcttgtagatactcacattcatggatttgcgggttatgatgtcatggataattctgaggaaagtcttataggcatgagtcaagccttgctttcagcaggtgtgacctccttcttaccgacagctttaacagcgccatttgaagagttgaaggctatttgccaaacaacagctagtacggttggtaaggagacaggtgctaaaattcaagggctcttctttgaaggaccttatttcactgaaacctacaagggagctcaaaatcctaaatacatgggcaatccaagtgtggaacaactgaaggaatggcaggaggcagctcaaggaaaactgattaaattggctcttgctcctgaacgtgagggagtagctgaatttatccaagaagcaaccaagcaaggcgtaacgattgctctaggtcattccaatgccacatatgaagaagccatggcagcagtggaagctggggcgtccgtttgggttcacgtctacaacgggatgcgtggttttacccaccgtgagccaggtatggttggggcagccttcgatagtccagaaacgattggtgaactgattgcagatggtcatcacgtggtccctgcagcttgtaaggttcttatcaagcaaaagacacctcaaggagttgccctaattacagactgtatgtcagcggggggctgtccggacggcgactatatgttaggcgaacttcctgttattgttgaaaatggtaccgcccgcctcaaagaaggtggtaatctagctggatctatcttacaacttaaagacggtgtcaaacatgtggttgattggggacttgtgacagttgctcaagccttacaaatggcaactagtgttccagctaaatcggttggacttgaaaatacttgcggaagcctaaaagcaggtttaccagctgattttattgtattagatgactccttggaattacaagcaacctttgttgatggacgaaaaggttgggaaaaataagagtatgagtagcactttcttatgaaggtgctgttttttattgatttttacaaaggtgttagtgtagtgtaaaatagaaatactttgtattttacaggagggaatatgtcaaaacgtatttggagcattgccctggcctatgtcggtgtaatgattggtgcaggggtatcttcaggacaggacctcttacagtattttgttagttttggagcctggggactgataggtgtcatagttctaggagttttgcatgttggctttgggcgactcatgattgctctgggaagttattaccgctcagacgatcactcagtagtcctggcagaaatcagtcaccctgttatctaccgtattttggatatcgctttgattatcacttgtttcctgtttggctttgttatgacagcgggggcaggggctaacctaaaccaacagttcggctttccgatttgggtaggtgccttcctgtgtacagctctgacaatctttgtgagtttcctagatttcaaaaaaatcattggtgttattggagtttttacccctatgattttggttatgattgccatgatattcgtgaccaatgttttagggcgtcactgggattttgctgagatggataaggtgtcgcaaaccattcaatctcccttcccaagtatttggctgtctgtggttaattattttgccgtttgtgtcatgtcagccatagccatggcctttgtcatgggtggctctattctcaaaatcaatgaagctgaaaagagcggagcctggggaggatttatggttggtgtgattttctttgtcacaaccttaatcctctttgctaacagtgatgaaattgctagctcggatgttcctatgttggctatcgctaaggaagtgaatcctatctttgcaacgctttacgctttagtaatttttggcttgatttttaataccgtctttagtctctactatgcccttggtaaacgcttttcagcaggtagtgagaaacgcttcaagttcttcgtggctgcatttgctcttgctggttttgctatttccttcataggcttccgtcaactggtagcggttatgtatcctattatcggttatttgggaatgctgatgttggtagtgctagttgtggctagctaccgcaaaaaagctaagattcgtaaggaaaaggaaattcgaaatcatctcttgtctatcgttgagaaggcttatgatcccaatcaagacttgacccatcgggacaagaaaaaggctgaagaacttcgagaagcctcaattcttgataatgatattctccatgaagactcccatgtacatgttcgtcaggaaatggggattagtaagaaggattagaattttattttacaagtttctctatttctgctataatactgacaagaaagaagggcttatggcgtttttctagcgagcttgggacagtggaagccaagtagagcaaagtaggcaagtggcgctttctctcagcaaatagctgaagacaaacagataaaatgaagtaataaattagggtggaaccgcgtttctgacgcccctaggtcgtttgacttaggagcagagacacggttctttttgtattctaagtcacggatttaatattaaattaaggagtatcaatgcctaagaaattaacctttcactgcgtcagtggcagatacctccttatagtcggactgccccacgctcagcactagggtgcctgagctagacgcagtactaactcgtcttgcctcgtacgatcgacgaggtagactcgtgtcgcaagaaattatagaaaaaggagtaaaacatgtccaaaaaattgactttccaggaaattatccttactttgcaacaatactggaatgaccagggttgtatgctcatgcaggcttatgataatgaaaaaggtgcgggaacaatgagtccatataccttccttcgtgccattggtcctgagccatggaatgcggcttatgtagagccatcacgtcgtccggcagacggtcgttacggggaaaacccaaaccgtctttaccaacaccaccagttccaagtggttatgaaaccatcaccatcaaacatccaagaactctaccttgagtcattggaaaaattggggatcaatcctttggagcacgatatccgcttcgttgaagacaactgggaaaacccatcaactggttcagctggtcttggttgggaagtttggcttgacggtatggaaatcactcagttcacctacttccaacaagttggtggattggcaactggcccggtaacttctgaggtcacttacggattggaacgtttggcttcttatatccaagaagtagattcagtttacgatattgagtgggctccaggcgttaaatacggagaaatcttccttcaaccagaatatgaacactcaaaatacagttttgaagtttctgatcaagatatgcttcttgaaaacttcgaaaaatttgaaaaagaagcaggacgtgctttggaattgggccttgttcacccagcctatgactacgttttgaaatgttcacacaccttcaacttgcttgacgctcgtggtgctgtttctgttacagaacgtgctggctacattgcccgtatccgtaacttggcccgtgtcgtagccaaaaccttcgtcgcagaacgtaaaaaacttggttacccacttcttgacgaagccacacgcgcaaaactcctagcagaagaggaagaataaaaagagttacaagaatggaaaatgggcaaacaaagtgagcccacatgactacccagaggcaagtcgaagacttgctaaagggataggcactgccgtaatggtatatggggatttttgaaacgttaggttcaaaaatcagttggctaaatccactttgatgagactgttggaaatcgatgtcaaggagacagaagatttccctacagcctcacaaagttagttagcgacgtccccagtacctaagatgcctatcaaaaagaagaattttgtaaaggaaaaaacatgacaaaaaacttattagtagaactaggacttgaagagttgccagcctacgttgtcacaccaagtgaaaaacaactcggtgagaaaatggcagccttcttggatgacaaccgtctttcatacgaaagcattcaaaccttctcaacaccacgccgtttggccgtccgtgtgattggtttagctgaccaacaatcggatttgactgaagattttaaaggaccttctaagaaaatcgccttggatgcagatggaaacttctcaaaagcggcgcaagggttcgttcgtggaaaaggcttgaccgttgatgatatcgaattccgtgaagtcaaaggcgaagagtacgtttatgtcactaaacacgaagctggaaaaccagctaaagaagtcttggctggcgttccagaagtgcttgcttcattgaccttccctgttagcatgcactgggctaacaacacatttgaatacattcgccctgttcacactttggttgtccttttgggcgacgaagcacttgaccttgatttcttggatatcaagtcaggtcgtgtgagccgtggacaccgtttccttggacatgaagtggaaattactaatgcggattcttatgaagaagaccttcgtaccgtttacgtgattgcggatagcaaagaacgtgaaaacatgattcgtgagcaaatcaaagctatcgaagcagaacaaggcgttcaagtccaaatcgaagaaggacttttgaatgaagtcttgaacttggtcgaatacccaactgcctttatgggaagttttgatactaagtatttggatgttccagaagaagttttggtgacatcaatggaaacgcaccaacgttactttgttgtacgtgaccttgatggtaaacttaaaccaaacttcatctcagttcgtaatggtaacgctgagcacttggaaaatgtcgttcgaggaaatgaaaaagtcttggtggcacgtcttgaagatggtgaattcttctggcgtgaagatcaaaaacttaagattgaagacctcgttgctaaattggctaacgtaaccttccacgaaaaaattggttctctttcagaacacatggcgcgcgctggtgtcattgcagcgtcactagctgagcaagctggtttgactgcagaagaaacggaagccgtagctcgtgcagctgaaatctacaaatttgacctcttgactggtatggtcggagagttcgatgaattgcaaggaatcatgggtgaaaaatacgctctccttgctggtgaagatgctgcggttgcgacagctatccgtgagcactaccttcctgattcagcagacggagctcttccagagactaaggttggtgctatccttgcgcttgcagataaattggataccctcctttccttcttctcagttggcttgattccatcaggttccaatgacccatatgcgcttcgtcgtgcaacacaagggattgttcgtatcttggatgcttttggttggcatatccctatggatgagttgattgacagcctttacggactttcatttgatagtctttcatatgacaatcaagcagaagtcatcaacttcatcaaagcgcgtgtggacaagatgatgggacgcacttcaaaagatatcaaagaagccgttcttgctggttcaaactttgtcgtggctgatatgcttgaagcagctgacgccctctcagaagctgctaagactgatggttacaaggcagctgttgagtcactttctcgtgccttcaacttggcagaaaaagcggatgcttcagtgacagtcgatgctagtctctttgaaaacgaccaagaaaaagcccttgctaaagcgattgaagagcttgaattgacaggttcagcaagtgacaaattggcacagctcttcgctcttagcccagtcatcgatgccttctttgacaacactatggtcatggcagaagatgaagcggttaaaaacaaccgtttggcccttcttgcaggtcttgtagccaaagccaaagctgttgcagctttcaaccaattgaacacaaaataatgatctggtaacaggtaggaagtaggttttattatgacacctgaaaaaatcgctcgtatcaatgagcttgctaaaaagaaaaaaaccgaaggtttgactccagaagaagaagtggagcaagcaaaacttcgtgaagaatacattgaaggttaccgtcgctcagttcgtcaccatatcgaaggaattaaagtggttgacgaagaaggtaacgatgtgacacctgaaaaactacgtcaagtacaacgtgaaaaaggtttgcatggccgtagcctcgatgatcctgaatcataataacgatgtacaagggtttggaatttttccaagcccttgttttgaagtataaaattctgaatattctgtataaaattgaccaattatttcaaaaatggtaaaatgtaagttatgttaaaaaatggcatgattcaatgagtcgtgctcaatagaattggagtgaaaaaaatgtcgcaaaagcaacatcataaagacgacgacaaccagactgagaatgggatggttcgtggtcttcaaaaccgtcacgtccagctgattgccatcgctggtacaatcggtacaggtctcttcctcggggcagggcgttctctctccctaacaggaccttcaatcatcttagtatatatactaactggtatcttcatgtatcttatgatgcgagcgatcggtgagatgctctatatggatcctgaccagcacacctttatcaactttattaccaaataccttggtaagggctggggattcttctcgggttggtcttactgggtatcactgatattcctcgggatggcagaaattacggcagtatcaacctatgtgcaatattggttcccaagttggcctgcctggcagatacagatcatcttcctgattatcttgagttcggttaatctgattgcagttaagattttcggggaagttgagttttggtttgggatgatcaagattatcaccattcttgctcttatcgcaacaggtatcttcatggtagcgaccaactttgaaacgcctgctggacatgctagtctttccaatattacacaaggcttccagatgttccctaaaggttgggtaagctttgtcatgaccttccaaatggtcttctttgcttaccaagccatcgaatttgtagggattacaacttccgagacagcaaatccacgtaaggtcttaccaaaggccatcaaggagattccgattcgtattgtcatcttctatgtgggtgccctcattgccctcatggctatcttcccatggcaaaaacttccagttaatgaatcaccgttcgtaacggtcttccaaatggctggtatcaagtgggcagcagccttcattaactttgttgtcttgacagcagcggcttcatcattgaactcaacactttactctacaggtcgtcacctcttccaaattgctaaggaaacaccaaatagtaaagtcatgaaagctttgaagctagatactttgtcacgtaatggtattccttcacgtgccatcattgtttcagccattgtggtatgtgtttcagccttcatcaatgtcttgcctggtgtatctgatgcctttgctttgattaccgcatcatcatcaggggtctacatcgctatctatatcttgaccatgcttgctcatctcaagtaccgtaaatctcaagagtttatggctgatggtttccttatgccagcctacaagattcttaatccattgactatccttttctttatcttcgtctttgtttgtctcttcttgcaaaagtcaacagttgtcggagctattggagcagccatctggattgtcgtatttagtatctatagtaactggaaacacagtaaataaatcaatctagctcacctttatggtgagttttttgttgcaaaaaaggacacaaggtgtcccaattattatctatgcaatactttcttggcttccatggtgaaagaaaccacttaagaggcccttactacgatggaaaatagcaggcttgtgatcgttgtgcgaacgaccattaacatcaagtttagcccattcaagagcctggtgggcatttcggtctgagactgtagatgtcccaatatagctgtagatgcctgcctgagcgagaataaaaccttgcagttggcgaatatgttcatcattgagtgtttcggaaaaatgaatcttaactgtcttataagttaaagattggacagactcaacgataggtgaatctgctaagaggtgcaaaagttcttgatgcttagtaaaggacttatcatagtccattggaagaattatagtatgggtaatccaatcttctaagttggctttagcctttttactaagacctcttgctgtgatactaaggttatctatattgaaaggaagttggtcgatgtgagcagtatttgaaccatatacctttctgaaaagcggtgtacttgatagaatatgtccagtaggagaaataatagctaaggcagtttccttggtttggtaaccaagttcgtggcattccatgctagcgtatgtatctttaaattcaataattgcacttgttttcatcgtgtaactctctttctgttagtttataaactaacaatagtttatcatgacttattatcttggtcaagattttacctcaaaaaacaaaaaatatttttgtaagggcttgcaaaaatatttgaactctgatattatataaccatagcaaaaggattgttactggtcagcaggcaaaacctagataaatacgaaaaactaatgggagtagtgtatactcaccctaattggttcttggtatttatttaggtttttttcgttgaaaaagcctcgaaagaactaaaatcctagaaaagaaaggagcccttatggctatatatactgaattagctgaagacattctcaaacacgttggtggtaagcaaaatgtcaatagcttaaaacattgtgtgacacgtttgcgctttgatttgaaagatgagtctaaagcagatgatgactaccttaagaaccgtgatggtgttgttactgttgttaaggcaggtggtcaatatcaggtggttatcggtaaccatgtccctgatgtttatgcggaggttctccaagttggcggtcttccagcaggtggtagtcttgatattgatgaaggtgatgcgcctaaagggaatctttttgaccgctttgtatctttggtttcaagtattttccaacctttccttggacctttggctgcggcagggattatcaaagggatagttgctatcatggcagcttgtggcttgtcagccgcaacgagtcctatgtatgtcatcttgaatgcagcaggagatggtttcttccagttcttgccaatcttaattgctttgacatctgctcgtcgtttcaaggttaatgagtttacagctattgcgattgcagcggcacttgtttatcctgatattgctacgctggtgactgctcttcagaaagctggtcaaggtcatgttctaggagttattccatttgcacttcctgcaggaggttacctctcaacagtaatgccttctatcttggcaatttgggtggcttcatacattcaaaaattctttactaagattactccagatgtcattaaagtcttcgtagtgcctttctttacattactcattactgtcccattaacattcttggtggtaggaccagttgccaatactttctctaatggattgacaagccttttccaagcaatcatgaactttaatccgattgtctttggttttatacttggtattttgtggcaagtcttggttatgttcggaatgcactgggcacttgttcctcttgcaatcttagatgtggcaacaaacggaagttcaagtattctttcagcagcacttttcccatgtttcacgcaaacaggtgtattgggagctatcatgcttaagacaaaagaagaaaaagtacgtaccatctctatgccagcatttgtttcatctatttttggggttacagaaccggctatctatggtgtgacactgccaatgaaaacaccattctacatatcatgtggtgtttcaggacttatgggggctgccatgatggccctagatattaagatgtattcaataggtggtctgggtgtctttgtcttcccaagccttattgggcctgacggtaatctttctaaagttatctttgccattatcattgccattgtgggtggtgttcttgccttctttatccaactctttgtacgagtaccaaatttatacggtggtggagcagctaaggttgaagaaaaagctgaggaagctgcacttgctcctaaagaaattcaacaagaaatcatcgctagcccacttattgggaatgttgtaccacttgaccaagttcctgaccaagtctttgcttcaggagctatgggtaaaggtatcgctattgatcctaccgatggtattgttgttgcaccaactaaggcaacggttaatttagtcttccctaccggccatgctattggtttgacaactgaaaatggtgcagagcttctcatccatattggtatggacactgtttctcttgctggaaaagggttcaagacctatgtggaagcaggggatgtcgtagaagcgggtcaaaaacttatagaatttgacctagcaactatccgagacgctaaattaccagttatcacaccagtcattgtaaccaatacagctgactttgatgatgtcttaacaactaaagaagctcgtgttaacactggtgattatctcctcaccgctgttaaataaaaaagaaatccgagaatcagcttctcggatttttgcttatttgaatttgtagtctttaacgacttcaacagaattgaccgttacattttcttttggtttgctgttgtcatcgacttcaagattgccaatggtatcaacgacatccatgcctttgatgacttgaccaaagacggtatatttagtatcgccagctgggtaaccaccttttttgtaggcgtcaatgataggttttggatagccagcatttcctagctgtttgctttgatcatccttgttttgaacaatgtagaattggctgccgtttgactctttagcaccagtattagccatagcaagtgcgccacggatgttgtataggaatggtgtaggctcaacagcgaaacctttcttccagatagattctccgccagtaccgtcacccttagggtcaccactttgaatcatgaagtccttgattacacggtggaaggtgagcccatcatagtatttgtccttggcatgcttcaagaagttttcagaagccttaggagcaagtgtagggaagagtttgactgtgatatcaccctttgaagtgtggaggataacctcagcttcgtccttgccaaccttgtctgacaactgtggaaaggcatcttttccagatttttgagccttttctaattgtttagtgaatatcttgttatcaacataggcatctccacgaacggcgcgtgagatgttctcacgaaaggcaaaacctaggcctgcgataacaagtacaataattaatggaatgtactttttaatgtttttcatatataactcctttggtgcattatacctactattgtagcagaaaaaaaccttttgggaaacggttaacagaggtctttaaatatggtagaatggaactatcaacaagaaaatgaacacgggactagatatagggaaaggttgcctcaagttataaagtgaggtcggactttttaagggacatatgctacttgctcttatcagagagaggtgtctagatcctgactatagaaaacttcgccaagtcgaagggatctcttgtttagatttcttgataaaaggagatttttatgtcaactaaagcagaatgggctgaactctttgagttggtacatgggcgtaagcctagcccccaagaatttttggatgctaaagcagctgactttgatacaagtgctttggctgctcaagcagcatctgtagaagcaccagctaatgaacctgtcgctgaagaagtagagacagaaccagttgctactgaaaaagtcacagaacaagatgacatcgcagatgtggctgaaacagctgaagatgctgtcgcagaacaagcaagcagtgaatcaccagttggtgcagaagctttctcagaagcacctgtgcaacaaccaaccccacaatttgattcaagcatgtttgaaaaggcacctatctcttcagctcaaggatttggaacagttcctaatccagcagcagctggctcagcagataaacctctcttcaatcttatcttgccaatcgttgcgattgcactttcagtaatctttgcaatcttggcatggtttgtaggtcctgcttggctcttcatcatcttgacagttctcgcagttgcagtggcagttgtttcacttgtctttagccttaaatcaagcaagaaattgctttcaatcatcgcaacaggtgttgctggtctcatgctctttgtttctattggtggtttgattttccaaatctctcaaaactctagtgacaacacaagctcaagcaagacatcaaaagttgctgataaagacgatgatgacgctgacaaaaaagatgatgacagcgattcaaaatctgactctaaatctgattctaaatctgattcaaaaggtgatagcactgacgtcaacgattacattgacaaaaatgctaaatttgattggaatgaatctaagttcaagaagttgaaagcaggtaaggataccgttaagtctatcatcaagacttatggtaaggcttctgatgcacaaatctctggtgatgagatgaagttgaattactctggtaaagactatggtgaaagtgtttacctaaactttaagaaacaatatgacggtacatttatcttgtcatatgcttcaggtagattccctcaagataaggtagaagttgatcgctcttacaaagctgactggacaaaagaacagtttgatgctctcaataagggtgattacactgatccatcaaacggtacgaaacttgaagatatcgttaaggatcaccctaaagcttcaagtgcagaatacacaatctcaacatctcgtcaaggtgaattcaaaaaagaaatgagtatttcttatagtgactatgaggctggagatggtaaactcaagagtgtttacttgtcatttgataccaaagaagatgacgatacgttctaccttacttataaatcaggtccagatggcgaggattaattaaggaacaggaggggagaccttcctgttttttcttgataaaaggagaaaactattgagatttttaaattatacattcgagcaaagtcagtctcttgtcactaaggagaccgtagaaaagctcaatcaaaaaggaagctggaaacgatttattggcttgtttatcacttcaattgttatttatttcttctctattatcacaccactgtctttagattctaatgtactgccatttcgcacttttaagaggtaatattctcctcgttgcataatgaaatggggcgttgcaccctagtttttaaaggagttgcgcatattttactattcgttgcgtgcttttagtcatgggtcttgataaatttaaagtaacaaatctgaggaggtattcttaatgttacaatttattaagaaaaacaaaactaattttatatgggtgcttgcttttggattaatggggttgatactgaaacctttagttaatttattggtcagtttatcaaacaaatatccgtgggttacgagaatgttattgtttctattactcgttgctacttactttatttataaacttcctctctatataatattaatagcaattttgttgatagagccttttatcgaagaatagaaataagctaggggtattaaaatggacattgctacgttgattaaagaatatagaactaaaacaggtatgactcagcaagaacttgcagataaagtatttgttactcgtcagacgatttctaaatgggaattaggaaaaagtgaacctgataatgtttcactggaactattatttaaagagatgaatattgaaaaagaatctcaaaaaggcattaaagctaatttaattagcagaaaaaatattttacttacaatcattgccgttttattctctccatcgatacttatcattagactattggtacttaaaataggcaagatagaaaataaaagattagtcattttgatcaatacctttctctttataataattggcatttatctgaagagtttaaaggataatgtatactttggtttcttgggaatcattgcaattgcttatagcctttatagtttttataagcttagtttggagattaaaaaagactagatacatagctatacatttaaatataaaaaactagtcttactaatactagactgtatatatgtgcaagatttctaaaggatgaagttatgtcagtaatctactcaaaagtaaaaatgtcaaataatatttttgaagcttgtaaattggtaagaaactttatgactataccaattagtgagataaaaaataggattcaaaagggagaagttttattagaatgtaattatctagatttagaggaattgataaaaatgaggaccctcctagaaagtcttgaaacattaggtgctcaaatatatttatatgaaggagattacgaggtaagtatggaattccttagtaatacaatcgagtcatataagggtattgctgaagatagagaaaagatagatgaattgatgttttctgatgagtaataaataaaccataatgtgaactgcccccaaaaagtgtgatagagaaaatctaacttttgggtgcagtttcttttcttcttccatccattttcatgagatggcttgtcacttaagcacctcaggcagtctcaaaaaattctctcttatatccgaccttattttcataagacgagattaaagtatgataaaataaagaaaaagagataaaggagtcagctatggcaactagagaagaatgggtgcgtcactttgaggacgtcaatggacgtaaaccaagtcctgaggagtttatggaagctaagaaagagggctttgtcattgcttcggaggaaccaagtgtccaagtgtctgagcaggttgaggctcagcaggtggataactctgaagctactgaagaggtgacagctgactcagtggcagatacgcaaccagacgaggctcaggtggcattagaggaggaagctcctaagccaatgcctgagttgaatatggagaaagagcaagaaaaagaagcaccaaagacaagtcagatacctttggaaaacccttattacaaaccaaaagtaaccaagaacaatgcttttgttaatattgctttaccaattattatcctagttttggggattctatttgtcgttttgtcttggacgcttcctattggttttatctttactttccttgctttcttccttatcattctagctattgtgactttggttttgagtctgaagtcgacacgcaaggcactttctattattgccctagtcatgtcaatcatcttcttcatgacttcgcttgctggagcaggctatcaagcagtgaaatttgtcatgaaccatgctgagcagttccaaagtgacggtcacgatagagcttatctgtacatcgatgagaattataagtttgactggactgaggatcagtttaaggagttgaaggttggtactttgacattggacgaggtcttggatgctcacggtaaggcgactgatgccgagtatagtgatgcttacgaggaagataaaccagatttgttagatcttacctatagaaaagaaaacacagatggaaacaactatgttcgtttgactttcgagcaaaaagacggtgtctatgttttgaaatctgcctcagcaaccttcgactatgataaggtcaaagaagtcgatgactatcatagcaactggacaaaagatgactatgaaaagttgtctgtaggtacacaagctgatttgctcaaggggacacgactttctgaggttgttgaaaaacacccagaggctagcttcacttatcatgaaatgacacaaactgaacaaggcgatctcactcagtcagtgagtcttagctaccgtgattataatccagaaagtggtaaggtagatgctgttcgtttgacctttgactatgataaacgtgaaaacgagtacttcttgacagacaaatcagacgaataagactactttttaattaattcaagctcagggttgcctgggctttttagtatcaacaaaagaggataaaatctggtataataggagtgattgatttttcaagaaagaagtgtcacacatgaacatacaacaactacgttatgtcgtagccattgccaacagcggaaccttccgtgaggcagccagcaagctctttgtgagtcagcctagcctttcggtggctatcaaggatttggagcaggagctgaatttccaaattttcactcgtacaacgacgggggctgtcttgaccagtcagggcatgactttttacgagcgtgcgcttgaggtggtacgcagttttgatagttttgaaaatcgctatctcaatgcttctgaaaagggcaatcagttttcaattgccagtcagcactatgactttttgccacctttgatcacgactttttcagagcgttaccctgattacaaggatttccgtatctttgagtctacgaccattcagattttggatgaggtagccaaggggcacagtgagattgggattatctatttgaatcgtcaaaatagcaagggaatccatcaaaatatggacaagcttgggcttgaggctattgatttgattccgtttaaaacgcatatttatctccgtaagggccatcctctggctaaaaaagaaagtcttgtcatggaggacttggcggccttgcctacagtgcgtttcactcaggagaaggacgagtatctttactattctgaaaactttgtggatacgtcagattcgtctctgatgtttaacgtgacagaccgtgcgaccttgaacggtatcttggaacgtacggatgcctatgcgacgggatctggtttcttggatgcacaaagtgtgaacgggattacggtgattccgcttgaggataatttggataacaagatggtttatgtccgtcgtaaagggattaacttgtcatcttgtgctctcaagtttgtcaatgttatgtttgactactttgatacttacaaaccataggaggatttatgcgtaaggttgcgattcctttggctattctggctttgattggtttggatcagtgggttaagcattgggttgtggcaaatattgcccttaaccaagttatcaaggcgattcctggacttttcagcttgacctatctgcaaaaccgtggtgctgccttttcgattttacagaatcagaaatatttctttgtgattttgacagttctagtgattggtgcggctatggtttatctggttaagaattaccagaagagtctttggctggtactatctttggttttgattatctcaggtggtattggcaacttcatcgaccgtctgcacttgggttacgtggttgatatggttcagcttgattttattgattttgcaatatttaatgtggcagactcctatctaacggtgggcgtactgctcttgattttaatcttatggaaagaggaaaatggaagtcatcattaaagaggcgggaaaccgtctggacaaggctttggcagatttgacagaattgtcacgtagtcaggccaatgaagcgattaaggctggaacggtcttggttaatggtaagtcggcaaaggccaagtatgcggttaaagagggtgatgtcatcacctatgaattgccagaagaagaggtcttggagtacaaggccgaagatattcctttggatattatctatgaagatgcggatgtggcagtggtcaacaaacctcaaggcatggttgtccatccatcagctggtcacacatctggtaccttggtcaatgccctaatgtatcatgtcaaggacctttcgtctatcaatggtgtggttcgtccagggattgtccaccgtatcgacaaggacacgtctggtctccttatgattgctaagaatgataaggctcacaatgctttggcggctgagcttaaggataagaagtcccttcgcaagtatgtggctattgtgcatggcaatttgcctaacgatcgaggtgtgattgaggctccgattgggcgttcggacaaggaccgcaagaagcaggcagttacagcgaaagggaaacctgcagtaacacgatttactgttcttgaacgttttggcaactataccttggtagagttgcagctggaaacaggtcgcacgcaccagattcgtgtgcacatggcttatataggtcatccggtggcaggagaccctctttatgggccacgcaagaccctcaagggccacggacaatttctacatgctaagacccttggtttcacacatcctacgactggagaattggtcgaatttacagcggaagaacctgctattttcaaggaaaccttggagaagttgagagaagcgtaacagttattaaacggatagtctttcttgggaggggcgtccgtttttttcttgtaaaagagtctgaaatttgctataatttacctaattaaataagtcctttaatcactgtccagagaggcaggcaaggagccatgagaagtgtacgggtgaactgtactcatatttttgtgtatctccttgttttcgaggggatttttttgtatttagaaaggttctttttatgaagaaaaaagagatcgtcgatgacgtaaccatgaaacgtgccattacacgtatcacttatgagattattgaacgtaacaaaaatctcgacaagattgtcttggctggtattaagacacgtggtgtctatattgcccagcgcatccaagagcgcttgaaacagttggaaaaccttgatgtgccattgattgagcttgacactaaggctttccgtgatgatgttaaggctgagcaagatacatctgttttccctattgaaattgatggtacagatgttatccttgtggatgatgtgctctacacaggtcgtacgattcgtgcagctattgataatatcgttagccatgggcgtccggcacgtgttggtttggctgttttggttgaccgtggtcaccgagaattgccaatccgtgcggactatgttggtaaaaatatcccaactagtgagtcagaagaaatcgaagttttggtcgcagaagttgatggcaaagatagcgtcaacattattgatccaagctaagttgactgacggatagggtaatatgccctttgtatcttgttaattgaacacgccctaagccttgtgcaaaaaagataaatattcttaggagctggcgctccgtcatcatatttcctatttttgctttaggctttagacgggctttgtatcttgtttaattgaacacgggactcatttcttaggaaaaaagataagtctcctagcactctttggagtgccttgtcgacttcctatttttctacagaaatgtttagctacgctaaaacgtccctttgtatcttaatttaaggagtcctttgatatcgtgaataacgtaaaatatgatgtgaatgatatgccaaaacctggtttattggttggtttgtcattccagcacttgtttgctatgtttggtgcgacggtgcttgtgccgattttggttgggattgatcccgctattgctcttttctcatctggtttgggaactttggctcacttgacggtgaccaaatacaaaattccagcttacatgggttctagttttgcctatattgcggctatgcagacacttatgaagactgatggaattgcggcggtggctcaaggtgccatggcaggtggtttggtttacttgctagtggctctgattgttaagtatgcgggtaaagactggattgataaggtccttccaccaatcgtggttggtccaattatcatggtgattggtttgaaccttgcggccaatgcagtcaatgatgcgacaactttaaataaaagctatagtatctatgctctattgatttcgatggtgaccctctttgcggttatcctctttaacatgtatggcaagaagattgtcggtgtcatcccaattttgcttggattaattgtgggttatattttctcagcggttcttggtttgctgacaggacatagttttatcaatttctcagaggtagcggcggcacattggattcaagttccaaactttgatattccatttgtggattatagctttaaactctacccaagtgcgattttgaccatggctccgattgcctttgtgacgatgactgaacactttggtcacgtcatggttctaaacagtttgactgagcgtgattacttcaaaaatccaggacttgaccgcacccttactggtgatggtttggcacagattatcgctggattctttggtgctcctccggtaacttcttatggtgaaaatattggggttatggccctcagtaaggtctactcagtttacgttattgcgggcgcagcagtgattgcggtcttgatgagctttattgggaagctatcagcactcttgcattctattccaactcctgtattgggcggattatctattgccctctttggggttatcgctgctagcggtttgaaaattttagttgaacataagattgattttgataataaaaagaatctcttgattgctagtgttatcttggtatctggtattggtggtttgatgattgaccttggtggtcttcaaattacgggtgtggcaagttcaaccattcttggtatcttgctttaccaaatcttgccagatcctaaaaaaggtagcaaagattagtcaatcaatttaaaaggaaaaactatggcgattgcagatggaaaagtgtcactgaaacatttggtgacaatggaaaccctcacgaatgaagaggtcttgggcctgattcgtcgaggtggagattttaaaaatggtagagctgatttccagctggatcgacagtatttcgctgccaatctcttttttgaaaattcaacacgaacgcacaagtccttcgaagtggctgagaaaaaacttggcttggatgtgattgagttcgatgctggaactagctcggtgaacaagggtgagaccctctatgacacgatcttaaccatgtctgccttgggtgttgacatctgtgtggtccgccactcggaagttgattactacaagcagttgattgatagtagaactattcagacctctattgtcaatggtggtgatggttcagggcaacacccaagtcagtgtttgcttgacttgatgaccatttacgaagagttcggaacctttgaaaatcttaagatttgtattgcaggtgatattacgcattcgcgtgttgccaagtcaaatatgcagattctcaagcgtttgggagctcagctttattttgctggtccggcagagtggtactcgaatgagtttgatgtttatggtcagcatgtggccattgacgacgtcattgaggacttggatgtactcatgttgcttcgtgttcagcacgagcgtcatggggatgacaaaggattttcaaaagaagactaccatgctctctatggtttgactgaagaacgttatgccaagttagctgatcaggcgattatcatgcaccctgctccggttaatcgtgatgtggagattgctgatagtctggttgaagcgcctaaggctcgtattgttgctcagatgcaaaacggggtctttgtccgtatggcaattattgaagctattttaaatggcaaagcgtaaacaacgttaaccgattcctgagagaatcagacgaaaaagaacatgggctaaatcttggaaaatagacaaatctttctagaggttagagcttctctgtcagatttgcttttcattcagattttaacgccctttgtatcttagtgaaaggaacaatttactataatggcaaaacgtttacttattttggaagacggcactatttttgaaggtcaggcctttggtgctgatgtggatgtgacgggtgaaatcgtctttaatactggtatgacaggttatcaagaatctatcacagaccagtcttacaatggtcaaattttgacttttacttatccacttgttggtaactatggtgttaaccgtgacgactatgagtcaattaagccaacgactaagggtgtcgttgtgtcagaggctagccgtcgtgccagcaactggcgtaaccaaatgaccttggatgagtttttgaaggcgaaaaacatccctggtatctctggtattgatacacgtgccttgactaagattatccgtcaacacggtactatgaaagccactttggccagccctggtgacagtattgagcacttgcaagatcaattgcgtgcgactgttttgccaacgaataatattgagcaggtatcaactaagacagcctacccagcaccaggtgttggtaaaaatatcgttttggttgactttggtctcaagcattctatcttgcgtgaattttcaaaacgtgattgtaacgtgactgtggtgcctcatgatatcactgctgaagaaattctccaccttaatccagatggcgtgatgttgtcaaatggtccaggtaaccctgaagatgtgccatatgcacttgatatgattcgtggcatccaaggtaaaattccaatctttggtatttgtatgggtcatcagttgtttagtttggctaatggtgccaaggcctacaagatgaagtttggtcaccgtggatttaaccatgcggtccgtgaaattgcgactggtcgtgttgatttcaccagccaaaaccatggttatgccattgaccgtgagtcacttccagattgcctcatggtaacacacgaagaaattaacgataagtcagttgaaggtgttcgtcaccgtgacttccctgcattctcagtgcaattccacccagatgcagctcctggtccacacgatgctagctatctctttgatgagttcttggaattgattgatgctttccaagctgaaaaagcacgtcgttaattgcaactgtctagtgactatagtggggtgtgacctcaggtctccccagtctactaccttatttaatgacaaccagagagttgtcaaatagaaaggagaagatacaggttcacggaagtgaacacgccctaaggactgtgtgaaaaagataaacggtgactagacgcttgggcgtcgtcgtcacgtttcctattttcactgggtccttaacgggctttgtatcataaattatgcctaaacgttctgatattaaaaaaattatggttatcgggtctggtcctatcatcattggtcaggctgctgagttcgactacgctggtacgcaagcctgcttggccttgaaagaagaaggttacagtgttgtccttgttaactctaaccctgcgacaatcatgactgataaagaaatcgcagacaaggtttacattgaaccaattacgcttgaatttgtcacacgtattcttcgtaaagagcgtcctgatgctctcttgccaacacttgggggacaaactggtttgaacatggcaatggaattgtcaaaagctggtattcttgaagagcttggagtagagcttttgggaacaaaattgtctgccattgaccaagccgaagatcgtgacctcttcaaacaattgatggaagatttggaacaaccaattccagaatctgaaatcgtcaatacggttgaagaagcagttgcctttgcgacagaaattggctacccagttatcgtgcgtcctgcctttacccttggtggtactggtggtggtatgtgtgccaacgaagaagaacttcgtgaaatcgctgaaaatggcttgaaattgtcaccagtaacacaatgtttgattgaacgttctatcgctggtttcaaggaaatcgaatacgaagttatgcgtgatgctgcagacaatgctcttgtggtatgtaacatggaaaacttcgacccagttggtatccacacaggggactcaatcgtatttgccccaacgcaaaccttgtcagatattgaaaaccaaatgcttcgtgatgccagcttgaagattatccgtgcccttaagattgagggtggctgtaacgtacagttggctcttgaccctaatagcttcaagtactatgttatcgaagtaaaccctcgtgtatcacgctcatcagcccttgcctcaaaagcaactggttacccaatcgccaaattggcagccaaaatcgctgttggtttgacacttgatgaaatgattaacccagtcactggtacaacttatgccatgtttgaaccagctcttgactatgtggttgctaagattccacgtttcccatttgataaatttgaacacggtgaacgtcgtcttggtactcagatgaaagcaacaggtgaagttatggctatcggtcgtaacatcgaagagtcacttcttaaagcctgccgttcacttgaaattggtgtttaccacaatgaaatgcctgagcttgcggacgtcacagatgatgctttggttgaaaagattgtcaaagctcaagacgaccgtctcttctacctttctgaagccatccgtcgtggttacactattgaagaattgtcagagttgactaagattgatatcttcttcctcgacaaattgctccatatctttgaattggaacaagaattggctactcacgtaggcgatgttgatgttctgaaagaagctaaacgtaacggtttctctgatcgtaagattgctgatctttggaatcaaacagctgaccaagttcgtgcgacacgtttggaaaataacattgttcctgtctacaagatggttgatacctgtgcggctgagttcgagtcatcaacaccgtatttctactcaacttacgagtgggaaaatgaatcaatcaaatctgataaagaatctgtcatcgttcttggttcaggtcctatccgtatcggacaaggggttgagtttgactatgcgacagttcactctgtaaaagctatccaggctgcaggttacgaagctatcatcatgaactctaaccctgagactgtttcaacagacttctcagtttcagataaactttacttcgaaccattgaccttcgaagacgtgatgaacgttatcgaattggaacaacctaagggtgtcgtggttcagtttggtggtcaaacagccatcaacttggcagagccattgtctaaagctggtgtgaaaatcttgggtacacaggttgctgaccttgaccgtgccgaagaccgtgacctctttgaacaagcccttaaagacctcgatatcccgcaaccaccaggacaaacagcgacaaatgaagaagaagcggttgaagcagctcgtaagattggtttcccagttcttgttcgtccatcatacgttttgggtggacgtgccatggaaatcgttgaaaatgaagaagaccttcgttcttacatgcgtacagccgttaaggcaagtccagaccacccagtccttgttgatagctatatcatcggacgtgagtgtgaagtggatgccatctctgatggtaaggatgtcttgattccaggtatcatggaacacatcgagcgtgcaggggttcactcaggggactcaatggcagtttacccaccacaaaccctttctaagaaaatccaagagactatcgctgactacactaaacgcttggctattggtcttaactgtatcggtatgatgaacattcagttcgttattaaggatgaaacggtctatgttatcgaggttaacccacgtgcaagtcgtaccgtaccattcttgtctaaggttactgatatcccaatggctcaagttgctacaaacttgattcttggtaaatcattggctgagcaaggttacaaagatggtctttacccagaaagcaaccatgtccatgtcaaagcaccagtcttctcatttacaaaattggctaaggtagatagcctccttggacctgaaatgaaatcaactggtgaagttatgggtacagatgcgactcttgaaaaagcgctctataaagcctttgaagcatcttacctccacttgccaacctttggtaatgttatctttactattcatgatgatactaaagaagaagcccttgacttggcccgtcgtttcgatgctatcggttatggtatctacgcgactgaaggaacagctaagttcttgaacgaacacggggttcacgcaacgcttgttaacaaattgggtgaaaatgatgataatgacattccagccctcgttcgtacaggtaaagcacaagccattatcaatacggttggtaacaaacgtacttatgatgaagacggagcagctatccgtagctcagctattgaagctggaattcctctcttcacagcgcttgatacagcagatgctatggtgcgtgtgcttgaaagccgtagctttacaacagaagctatctaatcatgaaatagagtctcagctttgctggggcttttttattgaagacaaagttttcttttgagacttttcttaagtgatgacggacatcagcgaccttctgcgaagttccatgactaagttttgagccgaaagtctcaaaacttccgaacgcctgaaactaatcgtttcagacgtttttatcactgcgaaaagtctcggtataagcttactaggttcgcaaaatctatttcatatttaaaaatagtttaattatgttctgagtctcagccttgctggggcttttttcttacacaaatgtaagctaacaaattaaaatgaaagctaagactatggttttgtttcctaagattctgctatactagaaacatgattattaccacatctttacgtgaaaacgagtccttaattgcgcgtgctcaagaattagccctggagctaggagttgactaccagcctcgtcgcaagttatccttggcaaaatgtttagagcgatttggagctttttatcttctatataaagacagactgtcttttgtcaatgcggatggcagtgagctatcctttcatccagatacagcagttcttaggattaaggcaccacatgatgctttagtcaatcttttgggtccgtcttccaagtctattctcgacacgaccatgggtctggcttccgatagtttagttatggcggcagtgggaaataaggtgactgcccttgagagtcaagaagtgatttttcaggtggtttctcgtggtttggccgcatatcagacagatgaaaagaagcttgaaaaagcgatgcggtctattaagacaattaagagcgatagcttatcctttttgaaatcccaggctgatcactcttttgatatcatttatgctgatcctatgttttcagagactatcaaggaatcggaaaatctacaagctatcaaacctttggccaatggcagccgtctgacagaagaatggttaaatgaggctaagcgtgtcgcacgagaaaaaattatcatcaaggcgcattttcgagataccgtttttgaggaacttgggtttgaacgtcagattcgtcccaatcaaaagctgcactatggtgtcatggatttaagcgaaggccattgacatagaaagttaaaagtattacaattgttttatttatgtgatacaaaagaaaagagagacttatgcgaaagaaaatcagtccaaagttatttaaaaataaaaaaagagtttggatcattggaggaattggcttccttgtccttttggtcctaggttttaacctttttgcaggtggtggcaaagatgataaggcttccgagtcccctacagcaagtaaggtaaccaaggggcagttggcctcgtccacccttctgactggcatggtgaaggctcagtcggaacagtacgtttattttgacaatactattggacgaaatgccactgtgacagtctctgttggtgaggaagttagcgttggtcagcaactggtccaatacgacagtacctctgcccaagcagcctatgatacggctagccgtgcctataataaggcagctcgtgaccgtaattatttccaacagtatggaacagctcctgcagcttcggcacaaacaagtagtgattcggatgaggatgattcgacgactaccgttagccctcaacagcgtcagcaaaccgaggcaagtaattaccaaaccttgcaagattataatgatgccgttgccaacgcagcatcagagctagaaaaggcacaagacgtcctaaaccaaacagtcattgtttcagatgctaatggaacagtcgtagaggttgcggactctgtggaccctgcttcaaaagagagccagaccctagtacatgtgaccagtgaaggccaatttgagattcaagggaccttaacagaatatgacattccaaatatttcagtaggtcaaaaggttaagattacttccaaagtatacccagatcaaacttggacagggaaagtcagctatgtttccaattatcctaagcaaaatgccagtcagtcagcgggtacatctagcaattcaggacagacaggttctcagtatgaatacaaggttcaattgaccagcccaattggtaagctcaagcaaggcttcaatgtatctcttgaagtgaccaaagatgatgatgccctgttagttccagtaactgctgtgaccaagaaaggatctgacaactacgtctgggtttacgatgaggagagtcaaaaaatcaagcaggtcaaggttaaacttggtaatgcagatgctaagcagcaagaaattgcctcaggactaaaagaaggccaaaaggttatcaccaaggctgaaaaattcttcaaggatggtgagaccctaaaggatgtgacggatgccgatagcaaaaaatcaaaagagactagtggagaagaggtgaagtctagtgactaagccagctcttatggtcttaaaaggcatcaccaagtctttcaaaaatggtcaggagtccttgcaggtccttaagggaattgacttatcagttgaagaaggtgacttcgtggcaatcatgggtccttctggatcagggaaatcaacccttatgaatattatcggccttcttgatcaaccaactacaggttcctatcaactcgagggagagaatgtagctgagctctctgaaaaccgcttggccaaggtaagaaatgaccagattggctttatctttcagcagttttttctcttaccaaagttaagtgcccaaaagaatgtagagcttcccctgatttatgcagggaaatctccacgtgaacgtaagcaaagggcagagcaattcttggaaaaagtcggcttgtcagaccgtagtcatcatttaccatcagagctgtctggtggacagaagcagagggtggctattgcgcgtgcactgtctaacgatccggcaatcattttggcggatgaacctacgggtgcgcttgataccaagacaggaacccagattatggatctcttaacccagctaaaccgagaagggaagaccattgtcatggttacccatgaaccagagattgcggattatgcccgacgtaagattgtcatacgtgatggggaaatcacccaagacacaacggacagcgttcggatagactaggaggtaagaatggaaaattggaaatttgctcttagttctattcgttctcacaagatgcggtccttcctgaccatgttggggattatcattggtgttgctgcggtagtacttatcatgggtctaggaaatgggatgcgtcagagtgttaccgatagtgtgacaggtgataaggatactgttcaagtctactatgaagccaagggtgaggagctagatcctgcctatgcggacctgtcacatccgaccaaaccggttaaagaagtttggttggagcaagtggctaggcagacgcctggtatcgatagttattttgtgaccaacagcctaacttcctctatctccctccagaaaaagactgtgaagaatgttaatatcacaggtgccagccagggctactttaaagctaaaaagttagagatgttgacaggacgttccttgcaagacaatgattataaaaacttttcacgagtcattgtcattgatcagatggtggctaaaaaactctttgagacgaatgaggatgcccttaaccaagtggttactattgggaaaaatgattatcgtgtgattggtgtttataagaataaagacacagcaatcggtgcctatggtgaaattggaacagctcttgtggccaatacccagttagcagctgaaaataacactgatgctattggccagatttttttccatgtgaccgatgtgaaaaatagtagcagcgttgctaaggatgctgccaaacgcttgacccagttggcccaagatgataacggggagtacaaggcagcagatatgagctcgaccttagatcaggtgaacacaatctttggaaccattaccaccgttgtcggagctattgctgggatttcactcttagttggtggaatcggtgttatgaacatcatgttggtttcggtaactgagcggacacgagagattggtcttcgtaaggctttaggtgccacacgtcgtaaaatcttgactcagtttctgattgagtccatggttttgaccatcttgggaggtttgatcgggctaggctttgcggccctagtcgttggaccaattgggaatgccatggaccttaaagcgacggtctctcttggcgtagcaatgggaagcattgctttctcagcagcagtggggattatctttggtctcctaccggctaataaagcatcaaaactcgatcctatcgaagctcttagatatgattagacatgacctcttgaaatcttttgattttgagaggttttatgcttttcaaaaaagatagagaaaaaaataaaaaaatttgcatttttttcttgacgtctgatttaggtcatgatattataaatgaggtttgaaaaaactgacctaagacagttggggagttaaactcataaacatccaaccgaggcacaaaacgtaactatttttttgtaacgtattgtactttcgtgtctaggtttaggtacgatttttttgtgcctagcccaaaaataaaaacggaggtaaaactactaatgagtgaagctattattgctaagaaagctgaacaggttgcgattgtcgctgagaaaatgaaagctgcagcatctatcgttgttgttgactctcgtggacttacagttgaccaagatacagttcttcgtcgtaatcttcgtgaatcaggcgttgaatttaaagttatcaaaaactcaatcttgactcgtgcagctgaagaagcaggtcttgaagaccttaaaggactcttcgttggtccatctgcagtagcattctcaaacgaagatgttatcgcaccagcgaaagttattagcgaatttgctaaagacgcagaagctcttgaaatcaaaggtggtgttgttgacggcgcgttcacttcagtcgaagaaatcaacgctcttgcatcacttccaaacaaagaaggtatgctttctatgctcctttctgtacttcaagcgccagtgcgcaacgttgcatacgctgtcaaagcggttgcagaaagcaaagaagacggtgctgcgtaagcccatcttcacaactcgtagcctaagctacgtttaaaaaattatattaaaaaacacatttggaggaaatcacaatggcattgaacattgaaaacattattgctgaaattaaagaagcttcaatccttgaattgaacgaccttgtaaaagctatcgaagaagagtttggcgtaactgctgctgctcctgtagctgctgctgcagctggtgctgctgacgctggtgctgctaaagattcattcgacgttgaattgacatctgcaggcgacaaaaaagttggcgttatcaaagttgtacgtgaaatcacaggcgaaggtcttaaagaagctaaagctatcgttgacggtgcaccatcagttcttaaagaaggtgttgctgcagctgaagctgaagaaatcaaagctaaacttgaagaagctggagcttcagttactcttaaataataaggtaacgactcaagtcgcttaataaagaaaaccagggcatcagctctggttttttattgcgataaacgattatgagaaaccgtttgaattaataggttccctaccaaaaaactgccaaatttatttttggcagtttttttgtttttctattttagattggttttgtttattttttatatgtgctgtaattatcacatattgatttttactaatataaaatatttttggatcctatctaaatgttaagtaagtacgtcttagtccagcgccatttcgaataaataattttaagtaagagtaatcctcattatgttctatatttatgatttttcctcttgcaataactgtatttcttctcctattttttatttgggaattgacatgattcatcatttattatctccttattttcaatttttctaaatatattatgtttgatattagtcgtagaaaaaatacgagaactaacctttttataaattttcattttcaatagtcaattcttcacaatgaaaatctgacttattatctgttttagcatcatatccaaatagtagagtagggggggagatcacgtctttctctctccaggtaatctcgttcgtgttgtgcaagcttttcatttaactctgtatcatgacgaataatattatcaagaccatcattttaaacagacgctaaaaatagaagatgttgtccttttatgacgaaaaaactacagtttatgacttcaatgaaactttagttgtctttatattatactaatcttgtaaatcataagaaaaggaacgtcaatcatgaaaacaacaactaaactcattggtatcctatcagctcttattgtagttatcctcgctgtctttttggtaaccaaatttaacagccatgaatcagctcgtgttagtacaagtagcagtccagccaagacggttaagaaatcatcttcaagctcaagtaaaactgttaagaaggataagaaatcagcccaatcatcaacttcagcagtttcaaatgaagaaaatgacaatcaggcttcagcagtatcacctaaagcttcttctcaagcccaagcaggaactacagatggtggacaagtggctgattctacaacaccagcttctcaagttggaggagttgaaggtggtcgaggtgcttggacagcaacttctggaacattgacacttgatgaggaaacccctgtatatgctgcaccagataaagacagtggggttgtttctaaaatgcctgcaggtgatgttgattgggataaatatgaaattttacctgatggaaactggtatagttttgtcaaagatgggcaacgttattatatttcatattcagatgtagggcattgataaatgattaagaagtctttataaaccacttttcaagtctatcaaggctttaagataaacatgaaataaaaaaagacagtaactattctgaagttactgtctttttttggtcttacgaaaaccactagctatgctagtggtccccaaaattattaagttatgtagcaaaaatactagaaacagactattcaaatgcaaaacctaagtcgattaaagaggttaaagttaaaagttgagacttacttacaaaatctgatagtttgagaaaagagatgatttgcactacgagtggtaatcgtagatttagggtatttttccaatatgctatttacattatgtaacccaaggcctcttccttcccctttactagagtaccccctagcaaaaatatgactaacatccactttttctgattttatactattttcaacgataagtaccaatgaatcatcattatttatgaaaacaacagtcattctaggacttgtggctttaatggtggcttcaatggcattatcacaaaggacagaaagaacagttatgaaatctagtaattctatcctaaaattactaacaggttcttcaatctcaacagaaattgaaattcccctattttgtgcctcaagtaatttagcggaaagaatacttttgatagcatcattcttaatattactaagtttaacaatatcaaacttactatcatagaattggtttgcactatctctaagtacgccattgtaaacagttttaatagcttcaatatcttgattatcaattcctaattttagactggtcaaaatattaatgtagtcatgacggaaacttctaatttcctcataaagtgattcaacatgatggctatagatagatagttcatttagttgagtatctttttgatcaataatttccttctctagtttttcttttgaaattgcattgagatagagtagcattacaaaaaacagaacaatataaaagttattaatatgtcctctccagttatctgcatcagctaatttgtctctataaataaccaatatagaaactaagaacatatatacaaacatagagatgttggtcagtaataataaatacttgaaatagtaacgcttgaaaccttcttttatttcgttaaaatctaacctaagagattttactatgagtaaatgaagagggaaaaccagtaattcaattaagatatcataccaacttagtttgacttcattgaagacagagactcctagtagaggaaaaacgtagaatcctaacattctacctagcaagctttcaacgataacggggtacaagccataaaaaatatcaagtgttttactaccatacttattttgatatatgttataagcaataaagataaaaaagaaagtaaagtacccaacaggaggacatatgatgaggagtagaacatacaaaaatggaccaataatacaccacaaaggtttgattggttggttactaacctgttgaaacagtaacaatgctactaatatcttagaatagaacagcaataaatttataactatatccatagaaacaccttagcttttcagagatttaactttttctaggaggcccttatatttcgtacgggaaatgggacattcattattattttcaaacattaccattttctcttctttattgatcttaacgatattttcaggattaacgataaatgaacgatggcatcgatataggcggtcgtcagctcgttcaacttctgaaatactggcgtagaactccattcgttcttctttagtatgcaaaataactttatgtattgttggagacgtttcaaaaaataagatattgttaaaaggaacttgaacttgagccgtagctgtttcaaaagtaaatgaatcttgggcaatagtagcacccattttattcatggtatattcaattgctaaatgaacacgttcataaaaatcttcatcatccaaagctttatcgataaaatctagtgcagcaactctatatttaaaagtgactggcataaattctgaatgtgttgttacaaaaacaattgttgcattagggtcttttttccgaatttctttcgcaatgtctagcccctttttttcttctcctttaatttcaatatctaaaaagaaaagttgatgagaacctctttcggtaatcgcatcaagtagctggctaggttttccaaaaatctcaggtcctttacattttagagatttttttgcaataacatccttaataacggtctctattcgtgtttgttgtaaaaattcgtcttctaaaataaaaatatttaacaattagtgtactctccattcgataaaatatttagtactgtagtaaaagacattgaagtctttttccagtatgaaaatatatttgttttgtttttttaggacgtctaaataaaaatccatgtttctttgcaaatacagataattttccctaatatgcagtacacatataagtatggaaacttttaagtaatgatagtagtcataaaaccggtatatcgtaacagttctagaaactattatatcggtatacttttactgtaaatgacaaaaaatgaaccgtttatgatatatgacaaattaaatggtataaccaagctataataaaaataggaattggaggtgaagtatgttcaatattgtgaggcacttttggttgttgataactgttaaaaagtatattaaaaaatataagttaaaagttaaagttaacaatcattttaattctataaggattactacagcaactaacactctttattttatcacatttacaaagaattgtaattatggaaaaaagttaaaaaaattaggaggagtaacgtttatgcacaaattattttattgacagcgaatattgattataacaaaatatttaatgaacatctcgaactattaggtgtcattgatatcaaaaagtcattagcgaatacctctaatgaaatcagtgattatctagattatttttttaatatcgaaaaggtgcactaacctccatgtacatgtaatatgtattggaggttattttttatcacctattaaatagttttttcgatgttttatcgtaacaaatgtttatttatgtatgttataacaaaacgaagttcaaatctgcaaacttttgaaacaaggatgtactttaattgtcttagaatcgctttctaggacaaatatatcctatttactggttttctctaaaaaatgctatgataaatctagggaggggattatgatgcagattaatcttgaaaatttagttcccatttctgaagctaaccaaaatttttctaaagttgctcgtatggtcgacagcaaggggactgcagtgattctaaaaaataataagcccaagtatgtattggtagaatatgacaccttaattaaaaaagaataaggtgagacagaagttgcagagtaggtcacagtcgacgatgtggctaactctgttttgtctcgtcatttagatgccttcaaggaattagctaaatgaagcgataaaacagataatttagtgatagcaaaatagatagaaaactagggcataagctctggttttttctattacttttaatattttcatttgttagaatgtaggtaatgtgcgtgcttgtcacgccctttttctgtgtcttttacggctttagtggttgtaaataactataaaaatcttaaaggcatggtaaatgctaaaaagaaaaggagaaatttatggcttatatttggtcttatctcagacgttatcctaagtggctagcaatgaattttacggcggccattttatttgttattgctaacttgggtttgccgacggttcttgccagaatgattgatgagggtttccagtgtctttttgattttggcgacaagtccacaagcaggagctattatttcctttgcgggaggaggacatggcacaccagcagaatacggacatgtggctttcgtcgaaaaactctacccaaatggctcattccttatctccgaaaccaattacaatggcaatccaaactataccttctgtaaattatctggagtggatagtaacttgagttttgcgtatacgacgaaataaaaaaggatatgctaacaatgacttgatttgttagcatattgttttggaggtggtgatacggatttgttagagaaacccgtttataattatattaaaaataatcatggagtaataacttttcgtgatatggaagagcttaacttttcttatcaacaactgaatcaattagtctcaaaagggaaagtggaatcaattgaaagaggtatctatcatctgccagatacctatatcgatgactattttagtttacagtaccgttttccatccttagaaacagcactttggttacatggtctgtcccttaccattccatttgagcctgtgatgacttttcctttcgggacaaatacgaggccaatgaaagaagctggtgtcaagccaattgtcgctagaaagtatcatgaaatcggtattattagactggagcgacaggctggacagtttatctcagtatatgatatggaacgaacattagtggagtgtttgagaacagcttatcatgtcgatattcaagttattgctccagcttttcaagcttactttaaaaaaggagctgttgattatgccaagttgtatcactatgcacaactatttaaagtaaccgaaaaactacaatcatatgtggaggtcttgtcgtgaaattttcaaatgctaatagtttcaaagctaaaatcaagaatattgcaaaagaaaaagggatctctttctcaaaagattagtcaaatatttgaagaatacggtgcgaatatgttggatgtattcggttgttatatgtataaatttaacaattgtgttacaatgaaaccatatagaattttaagttttctcaaaaactttttataactaagaacacataaggaggtaaaatggtgaagcattctaaaataacaaaagtttttcagctttcactcgtcatcatatttattttagtcttgttagggctctttgttccccagcagtttcaaaatattagtttttacttaaaaaatctcttaacaactagtgttggctggttttacttgttattggttacggggattttaattttttgtgtctttttaattgtaagtccgatagggcagattcgcttgggtaatcccacgagtcggccagagcattcgacgacgtcatggattgccatgatgttttctgctggaatggggattgggctggtcttttatggggcagcagagcctttgagtcactttgctatctcgacgcccaatgcagaaataggcagtgcggatgctctcgcagatgcttttcgttttactttttttcactggggatttcatgcttgggcggtctatgccctggtgggattgtctttggcttattttggctttcgtaaacgggagaaatatcagctctcagtcgtctttaagcctctttttggaaaatatgcggacggaccaatagcaaccattatcgataccatcaccattattgcgacagtgattggggtagcgacaacgctcggctttggtgcctcacaaatcaatggtggtctctcctatgtctttggtattcctaataatagtcttgtgcaagtcatcattatcatcattgcgacaattctttttcttatttctgccttatcaggtttaggaaagggtgttaaaatcctatctaatacaaacttgattttagctattgtcttgcttgctggagtcatagttttggggccaacggttaagatatttgacaccatgacagactctatcggcctttattttcaaaacttcttccgtatgagttttcgggcggcggcttttgatgagaccaagcgggcttggattaaccaatggaccattttttactgggcatggtggatttcctggtcaccttttgtgggcgtctttattgcccgcatctcaaaaggtcggactattcgcgaatttttgacagtagtgctattggcaccaacagtccttagttttatctggttttctgcttttggtaccttatctacttcactacaagattcgggggttgatttgacacgttttgccacagaagaaattctttttgcctcttttaatgaatatcctctgggaagtgtcctttcactcctggcaattattttagttttaaccttctttgtgacctcggcggattctgccacctatgttttggccatgttgtctgaagatggcaatctaaatccaagtaatcgtaaaaaggtgatttggggtgtcatgctggccttgattgctattgcactcatgttttctggtggattgacagctttacaaaacacgctcattattgtcgcttttccattttctatagtactagtgttgatgatgtggtcgcttatgaaagagttatatcacgaaaaagagcaaatgggactcgccattacaccagaccgatatcctgagaagaatcaaccgtttaaatcttatgaggaaaattaggaggatggcatggagttaagagtgcttcgttattttattactattgctgaggaggggagtatctccaaggcagctgagaagctgatgattactcagccgacactcagtcgtcagttaaaagatttggagcaggaacttggtgaacctctttttatccgtgaacatatcaagtcgcttaataaagaaaaccagggcatcagctctggttttttctattgcttttaatattttcatttgttagaatgtaggtgatgtgcgtgcttgtcacgccctttttctgtgtcttttacggctttagtggttgtaaataactataaaaatcttaaaggtatggtaaatgctaaaaagaaaaggagaaatttatggcttatatttggtcttatctcagacgttatcctaagtggctagcaatgaattttacggcggccattttatttgttattgctaacttgggtttgccgacggttcttgccagaatgattgatgagggaataaaccgtggtgatgttgataagctttacgcttatgcttgggtcatgtttggtgtagttttgactgggattgttggtcgtatacttctgtcctatgcggttggtaagttgaccactactatggtgcaagtcatgcgtaatgacatttatgctaagcttcaggagtattcccactacgagtatgagcagattggggtatcctctttggtgactcgtattacatcagatgcttttgtgcttatgcagtttgcggatcaggttcttaagctaggggttatcactcctttgatgatggtttccagtgtctttttgattttgacgacaagtccatctttggcttggattgtggcaatctccttgcctttcctagccgtagtagtctggtatgtggcggtaaaaacgcgtccgctttctgaaaaacaacaggcaactctcgacaagattaaccagtatgctcgtgaaaatctgactggacttcgtgtcatccgagctttcgctagagaagattttcaagagaagaagttcgcttctgaaaatgctgtctatgcggataattcaaacaaactttttaaattgactggtttgaccgagccactttttgtgcaaatcatcatcgctatgattgtggcaattgtttggtttgctcttgagccattaggttctgggactttagcaatcggtgacttggttgcttttattgagtacagcttccatgcactattgtccttccttttcctagccaatctctttaccatgtatcctcgtacagcggtatctagtgaacgtctgcaggaaattatggacatgccgatttctatcaatccaaatgaagatggcgtgacagaaaccgagactaagggatatttggaatttgacaatgtgacctttgcctatcctggtgaaactgaaagtcctgtcctacacaacatttctttcaaggcaaaacctggtgaaaccattgcctttattgggtctacgggttcaggaaaatcatcacttgtacagttgattccacgcttttatgatgtaacacttggacgcattcttgttgatggtgtagatgtccgtgactacaatcttaaggctcttcgtcgtaagattggctttattccacaaaaagccctactctttacagggactatcggtgaaaatattcgttatggtaaggaaaatgccagtcatgaagaattgaatcaagctactgatgtggctcaagccaaggaatttatcgaaagtaaggaagaacgctatgattctcacttggctgagggtggtagcaacctttctggtggacagaagcagcgtttgtcaattgcacgtgcggtggttaaacgtcctgatctttatatctttgatgattccttctctgccttggactacaagactgatgcgaccttgcgtcgtcgtctgaaagaagtgacccaggatgcgacagtcttgattgtggctcaacgtgtgggaaccatcatggatgctgatcaaatcattgttttggatgaaggtgaaatcgttggtcgtggccgtcatgaagagcttatggaaagcaatgacatttaccgtgaaattgctaattcacaattgaatcaaaagagtcttacggaagactagaaggaggtcaaaatgaagaataataaaaagaaaacaaatcattcctcaagttttggccgtctttggtcatacttgcaggcttatcgtttcccactttacctagccattttcttgaaaattgttagtgttatcatgagtgtccttgaacccgtagtcattggtttagctattacagagctgaccaaaaatacgctggatatcattaagggggtagaaggcgcccatatcaatgtatcctatgttggtttggttctggttgtttatctcttgcgtggtcttatttatgagttggctgcctactattccaactatttcatgaccaatgctgtgcaagcaacggttcaagatatgcgaaatgagatgactgataaaatcaatcgtacctcagtgtcatactttgataagcaccagtttggggacctcttgggccgctttactagtgacgttgagacagtatctaatgccttgcagcagtcattcttgcagattgttaatgccgtctttactctagtcttagttattggaacagtgctttaccttaatcttcaattgggagctatagttgtcgtcactattcccattactttctttggtgcccgttttatcatgagtaagtctcaaccttactttaagcagcaggctgatgctctaggtactcttaatggttttgttcaggaaaatctgactggtttcaatgtgcttaaactttttggccgtgaggatagatctttagacgactttaaagagattacggaagaccttcagaaggtaggttttaaggccaatttcatttcaggcctcatgatgcctgtccttaatggtttatctgacttgacctatctcattgtcgctgttctaggtggtttgcaagttttggctggtcgcttgacgattggtaatatgcaggcctttgttcagtacgtttggcagattaatcaacctattcagaacttgactcagttggctggacaattgcagagtgctaagtcttctttggaccgtattttccaactgatggatgaaccagacgaggctagtgatgctactgaagtgcttgaaggagatttgaccggtcaggttagctttaagcatgtagacttccagtatgtggctgataaacctttgattcgtgactttaatcttgaagtcaatcctggcgaaatggtcgctattgtcggcccaactggtgccggaaaatcaacgattatcaatcttctcatgcgtttctatgatgtgacggctggttctatctcggttgatggtcatgatattcgtaacttatcacgtcaggattatcgtaaacagtttggtatggtgcttcaggatgcttggctctttgaaggaactatcaaggaaaatcttcgttttggtaatcttgaggcaactgatgaagaaattgttgaagccgctaaggctgccaatgtggaccactttatccgtacgctacctggcggttacaacatggaaatgaaccaggaatcaagtaacatttcactgggacaaaagcaacttttgaccattgcgcgtgcgcttttggctgatcctaaaatcttgattttggacgaggcaacctcatcagttgatacccgtctggaactcttgattcaaaaggctatgaagactctcatgcagggtcgaacaagctttgtcattgctcaccgtctgtcaactatccaagaggcagacaagattttggtccttaaagatggtcaaatcatcgaacaagggaaccatgaatcccttcttgcagataaaggcttctattacgatttgtataatagccagtttgcagagaaataaacaaaataatccatcagttcataactggtggatttttgctgattttaacgagcaataaaagagacttccccagtgagagaagtctcaaaattaatatttatttctcagcaggtcgtgtgacgaacatggcatctccgaaactgaagaagcggtagcgttcttggacggcgtgtttgtaggcatcgaggacaaattcacggccagcaaaggctgaaaccaacatgaccaaagttgattttggaaggtggaagttggttgaaaaggcgtctacgactgtgaattggtagcctggtttgataaagatattagtccagcctgagtcggcttggagttgaccatcgtatttattgccgattgtctcaagtgttcgtattgaagtagttcctactgcaatgatgcggcctccagcggctttgacgctattaagggtatcggcagcgtcttgactgagggtgtaaaactctgagtgcatctcatgttcgtcgacattctcaacagaaacaggtcggaaggttcccagtccaacgtggagggtgaggtagaccaattttacgcctttggcttcaatcttttgaagcaattcaggtgtgaaatggagaccagctgttggtgcagcggcggagccattttccttggcatagaccgtttggtaacggtcacggtcttccaatttttcatggatataaggtggcagtggcatctcgcctaagctttccaaaacctcgaggaagataccgtcgtagctaaattctacgattcgaccaccgtgatctagttcctcagtgacagtggcagtcaagcggccatcgccaaaactgactttagcacctactttaaggcgtttggctggtttggccaatacttcccattgatccccttgggtatttttcaaaaggagaaattccacatggccgtgtgtatcaggtttttcaccgtagaggcgggcaggaagcacgcgtgtattgttcatgaccaaggcatctccagggttaagctggtcgatgatgtggtcgaagtgggtgtcagtcatttccttggttacaggatcaatgaccaagagtttagaggcatcacgttgttccaatggggtttgagcaatcagttcctctggcagttcaaaatcaaaatcgtttgtattcatttctttcctcgtttaaaaatgttcagcctttttattatagcacgatataggacgaccgtcattaaacttatcgagtgaaagcgcttgacaaaaaggttaaaaaaagagataataaagaaaatggtatataccaatatcgaggtgaatagaatgaaaaagattttagttaaaaatcaagttgagggaggcaaagttgcctttgatcttcttaaagagagccttgcagcgggtgctcagacattgggattggcgacaggtagttcgcctatcgccctttaccaagagatggttgaaagcgacgtggatttttcagaactttacagcgtcaatttggatgaatatgttggactagcaccagaccatgagcagagctaccatgcctttatgaaggctcaactctttgatgctaagccatttaaggagagcttcttgcctgacggcatggctgaggacttggagcaggcggctaaggattacgatgacgtcttggcacaacatgccattgacctgcaaatcctaggaatcggaagtaatgggcatattggttttaatgagccaggtacgccttttgatagtcaaactcatgtggtcgacttgactgacagcaccattgaagccaatagccgtttctttgctagtcgtgatcaggttcctactaaggctatttcgatgggaattgcttctattatggctgctaagaagattatcttgtttgcctatggtgacaagaaggcagatgccattttcaagatggtcaagggtcctgtgacagaggaagtaccagctagtgtcctacaaaatcatccagatgtgactcttatcctagatgaggcagccgctgcgaaattgtaatgctatcttgtggaaaatcaatccacgaaactcaggttgaggcatttagcgctcagcctttttcttttgtgaaaagtcacttccaagcaaatcaattgcctagccctctttgatagcgctataatagttaagttgactttgactatcaaacaacagatatagatatttcataaagaaagaggacatacaatggcaaaacctattcgagtattgctttattataaataccttcccatcgaaaatgctgagcaatttgcggctgaccacttggctttctgtaagtcaatcggtctgaaaggacgcatcttggtcgccgacgagggaattaatggaacggtttctggtgactatgaaaccactcaaaaatacatggactatgttcacagccttccagggatggaggacctttggttcaagattgatgaggaagaggagcaagctttcaagaagatgtttgttcgctacaagaaggaaatcgttcaccttggtttagaggatgataactttgacagcgacatcaatccgcttgaaacaacgggtgcttacttgtcaccaaaagagtttaaagacgcccttctagatgaggacacagttgtccttgacacacgtaatgactatgagtatgaccttggtcacttccgtggagccattcgtccagacattcgcaacttccgtgaattgccacaatgggtccgtgaccataaagaagagttcatggacaagcgcgtggttgtgtactgtactggtggtgtacgctgtgagaaattttcaggttggatggtccgtgaaggctacaaagatgttggtcaattgcacggtggtatcgcgacttacggaaaagatccagaggttcaaggggagctttgggatggtaagatgtatgtctttgacgagcgtattgccgttgacatcaaccatgtagatcctgtcgttgtcggtaaggattggttcgatgggacgccttgcgaacgctatgtcaactgcggtaacccattctgtaaccgtcgtatgcttgcttcagaggaaaatgaagacaagtaccttcgtggctgctcacatgaatgccgtgttcacccacgcaaccgttatgtctctgaaaatggtttgaaccaagaagaagttgtcgaacgtcttgcggcaattggtgaaagcttggatgtaacacctgcttaagtttaaatagtgaagaagctgagagagttctcggctctttttttgcaatttatttctaaaataatgacatatatatattgcaaatggaaatatatagtgtataattaagatgaaaacagatggtgaacctagtcaatttcgacgataatatcagatatgatgaaaaaggagggggcatgtggcaaagaatttacgcttaaaagcagctcgagcagagcatgatatgacccagggtgacttggcagaagcggtaggtgcaacaagacaaaccatagggttgattgaagctggaaagtacaatcccagtctagccctatgtattgccatttgcaaaacactggacaggaccttggatcaactgttttgggagatttaggaaggaagtaaagatgatgaaatttaagcttgttaataataaagttacagatgaacgcgaaaaagctctaaataataaggttgctgccgaatgtttttacataatgattgcagggacacttgcatgcttggtctatagctccttctttaacaagggggtcatcacctctaattacttgacctttccaatgttgatagcatggatttggtctatttatagatctgaacgacttagtgttaacacatttgggggttctggaatgacagtcttaggttgtttactggtgactgggcttatcacccttatgataatgtcagctaactatcggttcaaccacaatgtctatcataataatcccctggatcctagatatctcatggcttggccagttacttatattttgtatattccctttgtcttttttatgaattgggctctcacagcacttggaagatatgagaaaagacgtcttgaaaaacagctggacgatttggagaatgaagaataaatagtgatagaatcagaccgttctttttggtctgatttttttatgttataatgggtcctaaaattaaggaggtcacgtatgctactaactgaatttgatgcgaatagacaagcgattatcaatcccgaggacttgaatgagcctcttgaggggtttcctaaaatagctgtgtcctgtttttctcgttcgacctttcaacgaatgcttgagatgtttccccatgaacttatctatgagacgtccatggcgaatgtggctattccgatttataagcttgttattgctgagcaggagttggctctttttaatgcacctgtaggcgcctctgcctgtgtggctattttagaggatattttcgccttgggagctgataaacttgtactctttgggacttgtggtgttcttgatgaagatattaaagagacttctattattattcctagtcatgcccttagagatgaagggacgagttttcactatgtggaagccagcgatgagattgcggtaaatgtgggtgttttagaccgttttcgttcctatctcaatgaacgtcagatttctcataaggaaggcaaagtttggacaactgatggcatttaccgtgagacgaatggtaaactcaaagctcgaaaggcagcaggagccatttgtgtggatatggagtgttctgcagttgcagctttagcaaagtttagaggtgttgaaatctgtcatttcttctatgctgcagaccacctttctgaaggtaattgggatgcccgtaacttgatgaatcatgcagatttggatgaaaaggacaaggtagctttattagctttggagtttgtgtgtgactggagtgaaccttaaacattttactttttagttttattatttgtaatcattctaaataactgttataatattttttagaatgattctaaataaggagtaaataaattggaagataagaattttgcagagcgtttaaatattttgagagctggtgttttaggtgccaatgatggaatcatttccattgcgggagtggttatcggtgtggctagtgcgacatcaaacatctggtttattttgatttctgccttgtcagcgatttttgccggtgccttttcgatggccggtggcgaatatgtcagtgtctcaacgcaaaaagataccgaagaagctgccatcgctaaggaacaagctctcctggatcgctcacctgaagcagctagagagagtttgtaccaaaccttcctcagtcagggggattgcgaaacagcagccgaagtcaaggtcaatcaagccttcagtaaaaatcctattaaggtcttggttgaggaaaaatatggagtggacttggatgaaattaccaatccatggcatgctgccgtatctagtttctttgctttttcggttggttccttgccaccagcactagctatcatgctgttcccagagccttaccgtattcctgtaacagtggttgtggttgccctgactttgctcttgactggctatgtcagtgctaagctcggaaaagcacctattaaacaagctatgttgcgtaatttgacagtaggactcttgaccatgcttgtaaccttcttggtcgggcatatcttccacgtgaatgtgtaagtgttaataatggataagtctaccatgttaggtaggcttttttagtctgctagaccaagcttatccgtggtacaatagggttatgcgtttagataaattattaggacaggcgggctatggttctcgcaatcaagtcaagaagcttattcgtagccgtcaggtatacgtggatggcatcttggctgaacaagataatcttaatgtggatgctagtcttcaaaccatcacggtttctggtaaggaactggagcatgccccagaagtctactaccttatgaataagccagcaggtgtagtgtcagctcgtagggacaaggaacaccaaacagtcattgatttgattaagcctgaagatcagcgagaggggctttatcctgttgggcgattggatagagatacggaaggtttggtgctaattaccaataatgggcctttgggctttgccctgcttcacccacgttatcatgtggctaagacttattatgtcgaggtcaatgatgttcttgggcctgatgcacctgcattttttgagtctggtgttgtctttgaggatggtactatttgtcaatcagctcagctggaagttttaagttctgcgagtgacaagagctgtgctagaattacgatttcggaaggcaagtttcatcaagtgaaaaagatgtttttggcttatggcgtcaaggtaacctatcttaagcgtatttcttttggagagtttaagcttgatgaagggatagctgtaggttcctaccgaacgttgaccgaagcggaaaaagcaatcttacgtacttatcttggctagtagccttatgtggtttaaagtgcgataggaactttcaatctcatgataggttccctctatcatgacccttaatactgtaaggcccataacgacagtcttttctaggggtataagtgaaacttatggcattccataagtttttttaatttttcaagccttgtttctggtggtatgatggtatcaattcgattgagaactgaagtaagtcaggagcaatgaccaagtctaatcagagagggaggttcattatgacagaagcattttacgatcatttagcaaagacacgtcatcagattcaccaacatccagaggtttctgaggaggagcacgagacgacagtctttttgaaaggctatttgagaaatctaggtattgagcctttaaattatcccttgaagacgggacttatcgctgagattgggtcaggtcatccgattattgctttgcgtgctgatattgatgccctaccgatcaaggaaaagacaggacttccttatgccagcgacaatggggccatgcatgcttgtggtcatgattttcaccagacctctcttctcggagctgctcagcttttaaaagaaagagaagccgagcttaaggggactgttcgcttgattttccaaccggccgaggaaaatttccaaggggcctatcaggtcattgaagcgggtggtcttgacggtgtgtcagctatcatcggttatcacaataatcctcacttgaaacctggtcagattggtcttcgttcgggagctatcatggcaggtgtggagcagtttagggttgatgttaaaggtgtttcgtcccatgctgcccgtcctgatttgggtgtggatacggtcttggtcactacgaccatcatcaacaatttacaacagattgttgctcgtacggtatcgccctttgaatcagcagtattgtcagttactcatatcgaagttggaaatacttggaatgttcttccagcagcgggctttttcgaaggaacgattcgtacctttgagcctaaggttcgtgaagatgtcattgcccgctttgaaaaggtcgttcgggcgacagcagaccagtttggtgctcaagttgacattacttggggcaattcaccttacgtaacctacaatgaccagacgctcacaccacttatctttgaaaattctaaggccttcgcagaagtgattgaaacgctgccatcaacagggggcgaagactttgcggcctatcaaaaggaaataccaggagtctttgcctttgttggctcaaatggtgaagaaaatgcaccagactggcaccatgatgatttccttgtgaaagatgaggccttgccagtagctgttaattactatgtggaaaacgcccttttcctacttgactattttaaggagaaaggcaaatgaccattcccttaatcggtattaccagtaatgaaaaacttgttagtgttagggagttgagagcttcactgacgccccatttataggtgttcagtggtatgctgagtttctcttgggacataagctcttaaaagaccaaggactctttgattattttgttaagagttttaaataaagcttaagaactttaaattggtactacttttgatattgaaaaggaggacgtgcttaaggagaaaaaatcttttgatcatttagtttacacttaagaacccagccgattggttgggttcttttgtcgtattttagaagcaagatttcaggacttagaaagggagggaagatttttcacttgctatttttgagttttttagataaaatgaaagcgttatcatttcaaaaatagatagggagtggtcaagtcatctttttgatgtttgaccttataacttccgaataaggagaaacgtatgttaattggtattccaaaagaaatcaaaaataacgaaaaccgtgtggctctaacgcctgctggggtgcaaactcttgtagctaaaggccatgaagtccttattgaaaccaatgcgggtcttggatctggctttacggatgcagactatgaaaaacaaggtgccaaaattgttgctactgctgctgaagcatgggcagctgaactcgtggttaaggttaaggagcctcttgcagcagaatatggcttccttcgtgaggatctcctactctttacctacttgcacatggcagcagctccagaattggcagatgctatggtcaatgctaagacaacaggtgtggcctatgaaaccgtacgtagccaagaagggcacctaccacttttggttccaatgagtgaagtagcaggacgtatggccgttcaaatcggtgcacatttcttgaccaaacaagagggtggctctggagttctcctaggtggtgtgcctggagttcctaaaggtaaagtaactattattgggggtggtgtcgtagggacacatgcagcccgtattgcccttggacttggagctcaagtgactatccttgatatcagtgccaaacgtttgtctgtccttgaagaggtctttggtagccaaattcaaacactgatgtcaaatccgctcaatattgaagcgagtgttcgtgatgctgacgtggttatcggtgcagttcttatcccaggggcaaaagcaccaaaacttgttactgaccatatggttaaacaaatgcgtccaggttcagttattgtggacgttgctgtcgaccaaggtggggttgttgaaactgcggatcgcgtgactactcacgatgagcctgtttatgaaacacatggtgtccttcactatgccgttgctaatatcccaggagctgtggcacgtacatcaaccattgcccttaccaacgtcactttgccttatatcgaagcccttgcaggaaaaggattcagaaaggcaattaacgacgacgaaggtcttcgtcaaggggttacaacctaccaaggtcatatcactagcaaaccagttgcaaagggtctaaacagagaatatacatcaattgacgaattggcataaatagattatttagcataaacaaagaggagtcgcaccatgatttggttggctctttttttgtggtctgagataagaaatgctacaaagccgaaactattagaatttttctaattttggtcttattttatgctataatgagtagacatattaagggcagtaatgagtatctataaggtattttattcatgtttgccattaggaggttttatcatggccaaccatattcgcgttttcacagcaattattttctctcagcttgtcgtcttttattttggtcttcaaatggatgtatcattgtccgagcttatacttacagtagttgtggcatccctggttgagattatttatcatgtgtggcttgttcgtaagataggagccgatatttcttttggaactttttggaaaaattgcgaccaactttttagaaaaaatgctgtgctcttctttttttagttttttaccacatcattttcaaaggtggggatttcgtgtcctttatgatttggcaagttttctttgttgtcttggtgactactatcattttggcgtcaaatgctgcaccggaatcacgatagtacttagataatgcaatgaaagagtttagataatgtttagcattcacagaaatcatttgtcagaccagggcgttgactatgtcacatttggtcaaggagataaggttctcgttatcattacgggattaagtttgcaaggcttaagtgatatatctgaccttgccatttactcgctattttatcgatacgctagggagtataaggtctatatttttgatagaaaggaccatatcgaagaaggcatttcaattgaaaatatggctgatgacctctaccattctttacaagaattgcatattgctaatgcttctatcataggtatatcacaaggtggtatgattgctcagctgtttgctatcaagtatcctcaaaaggtgactagtctggtgttagctctgacattctctcgaaataatgctattagtagagaaaccatcagaggatggatagagatggcagaaaatggtgatatggaccagctaaatatggattccgtgagtaaatcattttcgtcacctgttttaaagaaattatatgtgattaacagattatttttgaagtctgtaagcaaggaaaaacgccatcgatttgttggtttagccaagtcaattctagcctttgattgctatagttcgcttgataaaatcacttgtccgacccttgttctgggagccaaaaacgatttggttctgggagtggatggtgcaagggaacttgcaaatagcattccaaatgcttcctatcacgaatttgacaaactaggacacgcgacctttattgaaagtaagcaatttaataaaatgatattagaatttctgcgagaaaacacttaggtagtggacttatgaaaatctattaaaatagaatgagaaaggggttacagtggagcttgtagcctctttttattttcagttcagatatgtgcagtctgaaaaattaaatgatagaatggcaatagataggaggacacagaaatgttaaactatgatttgattgttatcggtttcggtaaagccggtaaaactctggctgctaagatgaatgcggctggtaagaaagttgctgtcatcgagcgcagtaaagccatgtatggtggtacttgcattaatattgcgtgtatcccaactaagaccatgattgtagcggctgagaagggctggtcttttgaggacactatgaaagaacgtggtgcggtgactggtcgtcttaatgctaagaattataaaatgttggcagacaatggcgttgatgtcattgatgcagaggcacattttgtgtcaaataaggttattgaagtagtagctggtgatgaccgccaagagcttacagctgagactattgttatcaatactggtgctgtgtctaatgtcttacctattcctggtttgacaacaactgagcatgtctacgattcaactggtattcaaacccttaaagccttgccaaaacgtctgggtgtcctaggtggtggtaatatcggtcttgaatttgctggcctttataaccgtttgggaagccaagtgactgtcttggatgctgcgactagcttcttgccacgtgtggagccatctattgctaagttggccaaggaatacatggaagaggacggcattgtctttgagcaaggtgttaaaacttccgaagtaaaaaatgacggtgatgaagttgtcgttgttactgacaaaggcgagttccgctttgatgcgctcctctatgcaacaggacgcaagcctaatatcgaacctcttcacttggaaaatactgatattgccttgactgaacgtggtggtatccaggtcaataaacatttggaaacaagtgttcctggtgtctttgcagttggtgatgttaatggtggccttcaatttacctacatctcattagatgatttccgtattgtctttaattacctgacaggtgatggtagctataatcttgaaacacgtggagctgttccaactgctatgttcctcaacccacctttggcacaagttggtcttactgaagaccaagccagagcagcaggtggaccggttgctgtcaaggaacttctagttgctggcatgcctcgtggccatgttaacggtgatttgcgtggtgccttcaaagctgtggtaaatcctgaaactaaggaaatcttgggtgtgaccctctttggtcaagaatctcatgaaattatcaatctaattaccctagccatgaatcatcacattccatacacagatttggctaaacaaatcttcactcacccaactatggctgagaacctaaacgatttgtttgcgatttaaaatgaaaagagccgagaggctctttttttggaaacatatctctaatgcaaagcgacactctaggttagatgtcgctttttttgcgctttgatgataagatagaagtgacataggaaaattccttagattggtgctcttaatccactcagggaggttgatagaccttgagtcaccactagaaactgtatgaaaaacttagaaagatactcgtatgccaactggtctgtgagtgtgtatagcttatgactaagaaagtaggagtgggcaaggcccacagtaagattattttgatgggggagcactcggttgtctatggtcatcctgcccttgctctccctcttaaggatattgaggttatctgtcagattcaggcggctgagattcctttaactcttaaggctcaagatcccttgacgacggcgattttttcagcccttaactatctgaaaatcaagaatcggcctatcagttatgatatttcgtctagcgtccctgaaaagcgtggcatggggtcatctgctgcagtggccattgcggctattcgtgcggtttttgattattttgaccaggagcttagccaggagaccttggaaatgctggtccatcaggcagagaccattgcccatagtaaacctagtggtttagatgcaaagacctgcttgagtgacaaagccattagctttacgcgtaatatcggtttcaaggaaatcgaggtcaatttaggtgcctatctggtcattgctgatacgggcatccatggaaatacccgtgaggccgtggaaaaggttgaggctatcggactagatgctttatcagacctgaaccgactgggggaattaagtcagcaagcagaaggagccctcaaagccaaggatcaaaagcttcttggacagctcatgtctcaagcccataatcaccttaaatctttaggggtgtcttgtgatttgtcggaccttctagtagcaactgctctggagcatggtgcactgggtgccaagatgtcaggcgggggactgggtggttgcattattgccctaacaagtaccaaggatcaagcccaaacgattgctaaaaaacttcaagaaaaaggagccgtgaacacgtggatagaaagcctgtaagcgtcaaatcgtacgcaaatattgctattgtcaaatactggggtaaggcggatgcggagcgtatgattccttcaaccagcagcatttcactgactttggagaatatgtatacggaaaccaagttgtcttttctgcctgaggatgcgactggagatgtcatgtatatcgatgacgagctccaaggggaaaaagaaacaatcaaggccagcaaggttttagatctcttccgtacaaatcctaaccaacatgtcaagattgaaacttggaacaacatgccgacagctgcaggtttatcatcaagttcctcaggtctttctgccctagttaaggcggctaacgaactcttccaagtcggaaaaacacagtctgaattggctcaaattgccaagtttgcttcaggctcatcatcacgctctttctttggaccattggcagcttgggacaaggatagcggtgaggtttaccaagttgaaacagacctcaaattggccatgattatgctggttttgacagatcaaaagaaacccgtatcaagccgtgatggtatgaagttgtgtaccgaaacatcgacatccttcccagagtggattaaacagtccgagcaggattacgaggatatgttaggctacctcaaggttaatgatttccaagcggtcggtgagctcactgaagccaatgcccttcgtatgcaccaaaccacaagtacggctaatcctccattttcatatctgacggatgcttcctatcaggctatggacaaggttaaggcccttcgtgcttctggtgagcaatgttatttcacaatggatgcaggaccaaatgttaaggtgctttgtctggaagaagacctggaccgcctagcagaccatttccgtaaggactatcaggtcatcgtttcacgcaccaaggagttgccagatgcctaagcagtcggtcagtcgagccagggtaaaaacgggtggaaaactctacattgctggagaatattcagttctaacacctggacagacagccctaatccagtttatccctatctttatgtcagcagaggtcaaggaagcaccaagcacacagctatcttctgatatgtttgactatagtgttaaccgtgagccagacgcaaattatgccctcattcaagaggccttgaatacttttgaagcctattgtggtgagaatttgcccgctctggacctttccatcacaggaaaattagagcgagatggggttaagtttggtattggctcatctggttcagttgtggtattgactctcaaggccttggcagcggctctgcagaaagacttgtccgaagacattctctttaaattagctagttacaccctcctcaaacaaggagacaacggttctatgggggacctagcttgtatcgtatacgaggatctggtttcctatcgctcttttgaccgtgcaaaaatagcagagcttatagaccaaatgactctatcagagcttttggagaaagactggggatatcgtatcagacctgtagtgccagctctcaaagctcattttttggtggggtggaccaagcaagctgctatctcaaaagacatggttaagatggccaaatctcgtatatcaagcaagtatctaggtgaaaccgaagttgctgttcaagctgccatcaaggctctggaaacaggagataagaacttgcttaagagaagccttcaaactgtcagtgaccagttggaatcattgagtccagatatttatgtggacaagctgaaaaaactcaaagaagcagagcaaggactcgatgccattgctaagtcctctggagctggaggtggcgactgtggtatcgccttttcctttgaccaagctagccgagatgctctagttgagcgttggcagcaggtaggaatagagctcttgtatgaggtatagaaatcagcttagtagataataatcacgcaagaaagtaaagaaataacctatgacaaatcgtaaagacgatcacatccgttatgccctcaagtaccagtcgccctacaatagttttgacgatatggaacttatccacaagtctctaccaacttatgatttagatcagattgacttgtccacacattttgcgggacgagattgggattttcccttttatatcaatgccatgacaggtggttctgccaaaggtggtacagttaatcgtaaattggctgaggtggccagtcgaacaggtattctcatggtgacgggttcctacagtgctgctctaaaaggagaagcaccagaatcctttgactatcgtcaagagtttccagacttagacctagcgactaatatcggtgtggataagtctgtggacctggggattaagacggtggaagccatgaatccagtctttttacagctccatgttaaccttatgcaggagcttctcatgcctgagggagaacgtattttccacacttggaaggaaaatgtggtggcttatgcacagaacatagaggttcctcttgtgcttaaggaggtcggctttggtatggatgtggaaaccattcgttatgcaatgtctcaaggaatcaagactgtggatatctcaggtcgtggtgggactagcttcgcctatattgaaaatagtcgaggcggcaaccgagattacctcaatgactggggacaaagcaccgttcagaccctcttacaagcccaagaccttcgtgataatgtggagatcctagcctctggtggcgtgcgaaacccactcgatatggtcaaatgtctggttctaggagcaaaaggtgttggcctctcacgaactgtccttgaattggtggaacgttaccctgtggataaggttgtagctatcgttaatggctggaaggatgaccttcgtctcatcatgtgtgcccttgattgtcgcactattgatgagctaaaatctgttgattacatcttacacggtaagctgcaagggacatatatcaagcaaggaaagtaggaaagagccaagtgctctttttttcttgtcttacgaaaaccactagctgtgctagtggttccgaaaagcttttagcgatgtatcaaaaaagtccccctaaagtgttatattagataaggtttcccgaccactaactaatatacaaaaggaggacccctgatgagacaggataataatagtttagcacatactacatggaattgtaagtatcatattgttttccccccaaaatatagacgtcagataatctatgggaaatacaaagcaagtattggtcaaatcttacgattattgtgtgaaagaaaaggcgttgaaattcatgaagcagaagcctgcccagatcacattcacatgttggtgagtataccaccgaagctaagtatttcctcatttatgggatatttaaagggtaaaagtagcttaatgatattcgaccgacacgctaatttaaagtataaatatgggaatcgcaaattttggtgtcgagggttttatgttgatacggttgggcgaaatcagaagcgaattgaagactatattcgtaatcaattacaagaagacgtgatagcagatcagctcagtcttttcgaggaatatgatccgtttacaggtgagaagaataaaagaaagtagtcttaaagagacccgctagccgggtcagctagcaaaggtggtgctgaagggaaatcattcggtaggcctttaggcctcggccggtagcagaggctttcagccgaagagcaaaccacccgttctgatatgccccctgtcaagtagacaggttaaatatctaaaaaagtgtctgtttttgaaggtcagtcgtacataataaatgtacggctgtttttttatgcagaccacttagacttgtacttttcaattttgttattcttagcgattgggtatgacaaaggatgttctgatgataaggcagcgtttcttactgccaaaggcgttttacagtcatacctactttgtggacgctcttgacagtaaaatcggatatagtctttgatggcatatcggagggaggcctcatctgaaatctcatacatctgatacatttccgattttataattccccaaaaaccttctattggtccgttatcaatacaatggcccactcttgacatggattgaatcatatcagtatctttcagctttttttgaaagttcttattggtatattgaaaccctctatcgctgtgaaatataggcttcgctgcgggatttttttcaatggctttgtcaaatgttttgaagaccagccgattgtcatttcgaccacttatgacaaaagcaataggatagcggtcatataaatcaagtatgacactaagatagagtttcttatgagagttaggaatcttaaactctgtaacatctgttacccattttttgttcggagcagttgtatagaagtttcttgccaacttattttctgcagtttctttaggcttggcagtcttgtattttttccttttcttacggataaaagcgtggatatcgagtactttcataattcggtgaattctctttcttgagtaattcgtatgattgaaatgattgatccaatcggtcattcttcggtatcccaagatgtgtgaaaaacgttcgtcatattctttaattaattccgcaatttcgctgtttaattgttcttgttctggaactattctatgtttccatttataaaatgcagacctcgtaatgccgagctgatgacacatccagctaatgctccaccctttgttggtgttgaagtcttcgatcgctaagtattttgattcgtggcgctgtttgcctagcctcacatccttccgaattctttcactttttttaagagttcaacagtcatatccttttcttctaactgacgttttaagcgcacattttctcttcgtaaacgttctaattcatcaacctcatcatctagtttgtgatgaccccttttgtcaactaaaccttcttcaccatcactatcatactttttcacccacgaatacacttggctataagaaacatcataaagtgatgccgtttccttataattgcgattatgttcaatacaatagttgacaatctctttgcgttcatcaatagtggttttacgtcttgcttttgccatatagacctcccgttttggattgtaatccttaagttctatattggcattatacatcctaatccactttcttaaaagtcctgaagaaatatcatactgatgacctaaatcaatagatgaagcctcaccactaatacatttttctacaagttccattttaaattcttttgaataggaacggttttttgttttctttgtgaatcctaaaatcccatattttttatagatggcagcccaatcttgaatcgtccttgtggaaatatggagacagttacatatctcagatctggaacgattaccattaatataatcgagacaagcttgttctttctcgtatggggtgaacctttctcttctagacataaaaatacctcttaagtagattttaggtatttaccttgtctacttaagaggtatcatatcattctcacgggtggttttgacttttcttattatgttaaaatattgtaatgtaaaacattgtgtttttcagtcaacacatgcctgttttcagaaaaatgcatggaatgataggtgttgggttaaagaaatattaaaggagtaactatgtctcagcaggttattaaagcggacaatttaggcaaaagctttgggtcttttaaggccataagttccctcactttcgaggtcaacaagggagaaattttaggttttcttggaccgtctggatctggtaaaacgaccacaatcaatattctcacaggtcaattgacaccagaccaagggcaatcatcaattctaggtaagtcctctaccaatttgaacgagaaagaccttgctaatattggtctaattacggaaaatagtggctattatgaaaagttgagcctttatgacaatctcctctttttcgcaaaactctatgatgttccacaaggggaccttgatgatttgatgaagcgtgtaggtctctatgacagacgtaagactctggctgaaaagttatcaacagggatgaagcaacgtatgttactcgtccgtgccattattaataagcctcaagttctctttttggatgaaccgacttcaggcttggatccgtcaacttccaagtctattcatgaacttattaaggagttgcaagcagaagggacgaccatttttctaacgacccatgacatgcacgaggcgactatcctctgtgacaagattgtccttcttaataagggacaaattgtggaagcggggactccaagtgatctgattcaaaagtacaatacagctaaacgtgtcaaaattacctatcaatctggtgaggagaactacctatcgttttcagagttgggacaggtcggccagactgatgatattctaaccatccattcttgtgaaccaaccttggaagatgtctttatccaactaacaggaggtaagctcaatgcgtaagcagttaaaatcactcatgtggctcagacgccgaattatcttatctaacaaaagtcttttgcttcaagtcatgctaccatttggctttccctatctatacaaaaagctctatgaggttcaaggaacattaaatgaggagacaaagttcaatcttctagcgagttgtttgtctatggctctttcccttggtgtaggaaatataattagtaccattgtgtctgaggaaaaggagaaaaagactctccgaactctccttctgagtggtgttaagacgaaaaattacataatctctacccttgttttcccattcgccattagtcttgcttcagctcttttcattcctaaaattctagagattgatttgggtaaacagtcagatacttattaccttattgttttattaactgcggtagctgtcatgcttatttatctatttattggtatggtgtgtaagactcaagtttcttcacaaattgttagcctaccagtaacgatgattagccttttcattccaacattttcaggcatgagtgatacttttgataccgttataaaatatagtcatatgggacttttcacaaatggactcagtgatttggaccactttaagtggcaggaccaaaaagctagtttaatagctctaatcatctggatccttgtctttgcattgcttgacttcgtgcaggctaagaaaatacgaaagatttcttaattcgtctattgataagataagttcctattttgactacgacgtccgtactcacttcaggaaagtctcaaaaaagattattttacaaaaaggagcggaagctcttttttattatccaatcaagcaaaaagtcaactttccccttgacaagtcactgccttaggagtaatattttcagtgacatacggtaggtgaggctaccacaaggatacggatgactaccgcaaagcagtggagacactactcgttggtcaacagtcctgatcgccaaggtcaagactaagctcatttcatcgccttgcggagctaaagcttgaacggtccattttttgacagaatctattaaaaaatccacctcgagtttatagagtcttacctgtatatgggtaggactcttttcatttgtccaaggtccacccaccatcaaaaaattgaaaggagaaacctatgagactaatcgacgatcaccccgaaccgcacctaaccagtcaatcgctgattagtgtcttagggactccataagtgattggctcctgattaaataaggagattccaatgtcaacaaataaagaaagacttattgctgctcttcaagagccacttgaaacaacccttactcgctacaagactcatttggatggcttgaaggaagaccaagtagaagaaaaccgcgacctttatggggaaaatgtcataaccaaaggacaagaggattctatcatcaaaaagatttatgaatctatcatcaatccctttactgttattctcctagtcatcgctctggtttcctttatcaccaatgtctggcttgctaaaccaggtgaagaagatccaacgacttctatcatcattgtcactctagttttgatatctggtggtatccgttttattcaagaacttcgtagtgacaaggctgctagcaatttgtctcgcatgattgtcaatactgcaacagtacttcgagatggcagtgagcaagaaatcccaatcgatgaaattgtggttggagatgtggtcaaactgagtgcgggagatatgattcctgcggatgtggtcttgctagactctcgtgatttctttgttcaacagtctggcttgacaggtgaaagcgatgcagtggaaaaggcttgtctggataaggcggatggtcaaaatctagagagtttgcttgagagtgagagccttgctttcatgggaactaatgttatctctggccgtgcaacagccttggttttagttgttggtgatgaaaccatgatgggagctatcgagcagaccatcaatacttatgacgaaccaacttcatttgaacgtgagatgaactccatttcttggctcttgattcgacttatgttggtcatggttcctgttgtttttgtgattaatggtttaacagatggtgactggcttgaagccggcgtctttgcccttagtgtgggagtcggtttgaccccagaaatgttgccgatgattatcacagccagtcttgccaagggttctatcattatggccaaggaaaaggtggtcatcaaaaaacttaatgctattcaagacctaggggctatcgacatcctttgtacggataagacaggaaccctgactcaagatgaaatcgttcttgagtaccctcttgatattcatggtgaccttgacctatcagtgcttcggagagcctatcttaactcttatttccaaactggcttgaaaaatcttatggaccgtgccattattagtcgaactgagagagaagctaagaaacacgagattgttcgtgaccttgaccaaaccttccacaagattgatgagctcccttttgattttgaacgacgtcgcatgagtgtcattgttaaagataatgatggttttgtcagtatggtgacaaaaggtgcccttgaagaaatgctctcagtttctaactatgtggaatacaagggtgacattatcccattaaccgacgatgttcgtgaggaggtccttgcggaagtcgcacagttgaatgaacaaggtttgcgtgttctcggtgttagctacaaatcacagcttaatgaaaatgacgtctttagtgtcgaagatgaaagtgatatgattttgacgggatatcttgcctttcttgacccaccaaaaccatcagcagcacctgctatcaaggctttggcagagtatggtgtgaccacaaagattttgactggagacaatgataaggtgacacaggctgtctgtgaaaaagttggtctagatgtgagacacatcctacttggtagtgatcttgataccatgtcagatcaagatttggctaaggctgtggaaacgacaacagtctttgctaagttatccccagaccaaaaggctcgaattatcctaagtcttaaggaaaatggccacaaggtaggctatatgggtgatggaatcaacgatgccccatctatgaaggtgtcagatgtgggtatctctgtggatacagctgttgatattgccaaagaaactgcagatgttatcttgcttgataaggatctaatggtcttggaaaaagggctggttgaaggacgtaaggtctatgccaatatgaccaagtatatcaagatgaccgtttcttcaaatttcggtaatatcttttctctcctctttgccagcatcttcctaccattcctgccaatggcacctgtgcatttgattgtccttaatcttgtctatgatatttcttgtatcgctcttccatttgacaatgtggacaaggaatttcttaaagagccacatatctgggaagctaaatcaatcatgcgtttcatggcttggtttggacctatttcgtctgtatttgatattttgacttacatcttgctctactttatcattgtgccaatgattttggggcatggctatgttcatggttcaccagaagcagcagcctttatcatcattttccaaacaggttggtttatcgaatctatgtggtctcaaaccatggttatccacatgttacgttcaccaaaactcccatttattcaaagccacccagcactatctgttgttgtgacaaccttatttgctgctttctttgtgacttctcttccatacagtccattggctagtctcttaaaactcagccatctaaacggtctctatttcattctcttgtttatcatcattactttgtatatgcttagtgttacctttgtgaagcatatctatattaagaaatataaagaatggttgtaggataactattcttagaaaaagagcgtcagctctttttcattacctttcattctgccaaaaccttttcatttatggtataatagggcgattatagataatcagaggccctaaaaaacgtcagttatgaggacatattttctaagaaatgagagactatgttttcaaggcccctttctttcgtaggctatcccagtgggaggtggaggccctgagatttggggctcaaggctaagaccgtcacgaaagaaatcatcacaaaaaaatattaagaaggaaaaagaaaatgagtaattacgctattatccttgctgcgggtaaaggaactcgcatgaaatcagatcttccaaaagtattgcacaaggtttcgggcatcactatgcttgagcacgtcttccgtgcagtttcagctatcgaaccagctaaaaacgttactgttattggtcacaaggctgaacttgttcgtgaggttttggatggtcaatctgccttcactatgcaaactgagcagttggggactggtcacgcagtaatgatggctgaagaagagttggctggacttgaagggcaaacgcttgttatcgccggtgacacgcctttgattactggtgaaagccttaaaaaccttattgatttccatgttaatcacaaaaatgttgccactatcttgactgcaactgcagacaatccatttggttatggtcgtattatccgtaacgaaaatggcgaagtgactaagattgttgagcaaaaagatgccaacgaattcgaacaacaggtcaaagaaatcaatacagggacttatgtctttgacaataaacgtctcttcgaagcacttaaaaatatcaacactaacaacgctcaaggggaatactatttgactgatgttatttctattttccgtgagaatggtgaaaaagtaggtgccttcactcttcgtgactttgaagaaagtctcggggttaacgaccgtgttgccttggctacggcagaagatgttatgcgtcgtcgcatcaaccaagctcacatggttaatggtgttactttccaaaatccaaacgctacttatatcgatgtggatgtggaaattgagccagacgttgtcattgaagccaatgttacgcttaaagggcaaactaaagtcggtgcagagtcagtgcttaccaatgggacttatattgttgattcaactatcggtgccaatactgttatcactaactctatgattgagcactcagtggttgaagaaggtgttactgttggtccatttgcccatgttcgtccagattcaaccctcaaaaaagatgttcatatcggtaacttcgttgaggttaagggttctactatcggtgaaaatactaaggctggtcacttgacctacattggtaatgcggaagttggttctgacgttaactttggtgccggaacaattaccgtaaattatgatggacaacacaagttcaagacacaaattgccaacaacgtctttatcggaagcaattcaactttgattgcaccgcttgaaattggggctaacgctcttacagcggctggttcaaccatcacagatgatgtgccagctgacagcgtagccattggacgtggccgtcaggtcaataaagaaggctatgccattaaaaaacctcaccaccaaagccaacaaaagtaggcttaagactatctgagctagattctcttgtagagtagaggtagcttagaatgaggtcagaagtaaaaggagtcaattcatggagtttgaagaaaaaacactcaaacgtgagtcaaaatttaagggacatatttttgaagttgcagtagacgaggtcctcttgccagacggtaagacagctggtcgtgaactcatcttccacaagggagcagtagctgttttagcggttaccccagaaggaaaaatcattatcgtcaaacaataccgcaaggctattgaggcggtttcttacgagattcctgcgggtaagctggaagtcggtgaagctggcgatgagatggctgcagcggcgcgtgaacttgaagaggagactcaatacaagggtgatctggaattgatttatgaattttacacagccattggcttttgtaatgagagaatcaagctctatgtagcgactaaccttaaacctgtgggaaatccacgtccacttgatgatgatgagttccttgaactctatgaattgacctatgaagagtgtatggaacttgtagcgtcaggggctatccaggatgccaaaactatcatcgcactccaatactatgcacttcatttcggaggaaaataagctatgggcaaaccacttttgaccgacgatatcattgagcaggccaagcgtggggaaatcgatttagaggaacatccttattatgaggactatgatcaagagttctatgacgaggattatgaggctgattatcagccttctgcctacaagagccgtcgaattgagaatgccaaacgcaatcaatttcaacacaagcttaatcgcatcctcttttgggtagtggtcctcttgattcttctcttcattgctgtcttttatttctaaaaagtctatgagtcagatagccctagctactgattcaggaaagattacaagctgaaaaggaactatatgaaaatcggaattatcgctgccatggagcaggagttagtgcttctagtggagcaattggaaaataaggttgaagaaactgttcttggcaatacctactacacaggacgtttgggaaaacacgacgtcgttttggtacaatcaggtgttggtaaggttatgtcagccatgtctgtggctgtcttggcagaccattttggcgttgatgccctcattaacactggttctgcaggagcagtagcacctggacttaaaattggagatgtggttgtagcttcaaaattagcctatcacgatgttgatttgacagcctttggctatgattatgggcaaatgtctatgcagccactttactttgaaagtgactctaccttcgtagagactttcgaaaaggtcttggctcaggcttccattgattctaagattgggcttatcgctacgggtgatagcttcattgcaggtcaagacaagattgatgccattaaggggcattttccagaagtcttggctgtagagatggagggagcagctattgctcaagccgcacacagtgtcaaaaagcctttcatcgttgtacgtgccatgagtgatacagcggctcatgatgctaacattacctttgatgaattcattattcaggcggggaaacaatcagctgctatcttggttgagtttctcaaagaacttgcctaaaatacattaaatgagtgcttatgctcattttcttaattaatttaaagatgactgctattcatttaagaatggcagtttttttctgcttttagataagataagcttctcattttttaaagaaaaaatctgaattttagcatttttcagacggaagttgaattaaaattatggcaataaaatgagaaagaaaaataatattaaaagagagactccgaaagaaagcttatcatataagggtttacaaatttcactatctattgatatcttagaaagctttacaaaacctccaaaggggtaaataattatcttgcaaagttctgaaaatagtgtataattcagaatgaaaagggttacaaaaatgttaagatttgtaaaaatgggaggatagaatcatgaataaccgattcggtgattcgaggcagcgtttctccatccgtaagtttacggtgggcgttgcttcggtcttactttcgtctgcagtttttggtgtaagtaccgccaaagcagatcaagctgaagagcctaaaggccaaccagcgacgagtgtacttgaggaagccagtgagtctgatggtgggggccaaaggacaagcactagtgcctcaagtcaagaagtgacagctgaacctaccgttcaagcagaaagtaccagtgctatctcagtaactgctgtttctagtgaagttgcgcttcaagagcaaacggttgcaagctctgaacaaaagagtacatcacaagataagactagtgaggggctcagtgagaaacctgttacagtcaatgaaacacgagaagctagcgctagcgacctcgctgcagctaacaatacgagttccacttcgtctgataattttggacttaaggttaccaacctaagtcgcccgattccagcggatgtcaaggtgactaagacaggtactgaaatcactgttcaaaatcctgatgtggaaatggaatttccgaacggaaatagtaagtacgctactagcaaggttgtctaccacaatattcctttccctgatgatatgactatcaatgaaggggatcaggtcatttttaatttgcctgagcagttgcgtttccgtactagctacgatatcaatgtctataatccagacaatcaaattgtaggtctggctcaaattgatcctgagaagaatcgtgtcacaacgacctttaataactatttccaaacacatcccaacaataagctcatgagtttggagttggataccctttattctgaagaagtagatgaaggggaacatcttactcttgattttgagggacgtatcattcatgtttcagtgggtaaagtgcaatcacctcctccaggtcaagaggttatttctaagtggggtagtcaagacaagcatgatcctacgcttttgaattggcagatgcgtctcaattactcacgacgtctccttaacaacttgaaactggttgatacttggtctgacaatcaaagatttgtggacggttctttgcaacttcgctacattgattcggcagatccttggattgacaagggatcagctatggatctgattaagagtttctcttatgatgatagccattttgagcttaaactcaatcagttggaccgcatggtttatgtttggtatcaaacccgtttgacacaacctgttgaagaatcagctaaccctgtcaaccgtattaaacttcatgctgatgttgtttccgattcttacaagtcaactattcgcttggttggtggccgaggagatgccatcggagataacctcgctcatttcaatcttgagcttgagaaggacttggcgggtagagacctcaaggacaaagaatttaccttcaaattggttgatgtgactgatagtgccaatcctgttgacttaggggaaaccactaatgatgccaagggtaaaatcatcttttcagatctctcactcagtaagccaggcatctatcattatcgtgtgacagaggttccaggtaatgatgaagatgtggtatatgacaaactagaagctaatatcactattcaggttgttcgtgaaactgtggataatcaagttaaattggttgccaaagttgtctatccagaagatattatctttaataataaattggtcactccagctaaagctaaaatcgcattcggtaaggaattgaccaaggcaggcgttaaacaagatctaaaagcagatcaattccaatttgttctcaaagaccgttttggaaaagtccttgaaactgttggtaatacagctgatggtcaggttgcttttagtgagttaacctttaacaaggtaggtacttacaactacactgttgaagagcttacaggtaaggatgactcgattgtttatgacagcatgaaagctgctgtttctatcacggtaacacgtgatggcgacgcccttgtttcaaccgtggttaatcctaaagacactatctttaacaacaagtttgtgactccagctaaggccgctattcagttcagtaaggaattgactaaggcaggtgtcaaccaaactttgactgctaatgagttccaatttgttctcaaagatagtgccggtcatattgtcgaaacagttggtaatacagctgatggtcgtgttgcctttagtgaacttcactttgataaggcaggaacttacacttatactgttgaagaagttaagggaactaacgaagatatcatctatgatggtatgaaagcaactgtctggattacagtgacacgagatggtgatgctttggtatcaacagttgctaatccaaaagatactgttttcaataactatgtgaaagacgtgcaaccagctaaggccaaattcgaattgaccaaggttcttacaggtcgtaacctcaaagatggtgagtttagtttcgttctcaaggacgacaagggtaatgttatccaaacagtgaccaataatgcacaaggaaacattagttttgaaaatattgtctacgacaaaccaggtgtttactactacactgttgaagaagtcaagggcaatgaagctgacgtggtttatgataacatggtggctaaattccaggtgaccgttactaagactgtaggtgaaaaggaaaatctgcttgtagcagctgtccttcttcctttggatacagaatttaacaatagttacattcctccaaaacctcctacaccgccaacaccgccaacaccgccaacaccgccaacaccaccgacaccaccaactccgcctactccaccggtgactccaaaaccagctaagccagttcaatcctctgagaaatcaggacctcaacttccagagactggtcaagctaatgatactgctttgcttgcccttggtgtggcagcagaagtggcagcagtcatgggtgtagcatatagccatcgtcgccgtaaagacgtttaagatgatgacctaaaagatcgagtattctcgatcttttttagtatttggccacccatctcattaaatgagaaatcaagataaagccaactgcaagatgaaatttctactaaattaagctataatgaagagtatgaaagttctactttatcttgaaggaaaatcggttcttgaaaaatcaggaatcggacgggctctccaccatcagatgcatgccttggacttggcggggattccctatacaacggacatcttgggtgattatgatgtcgttcatattaatacttatgggccacgcagcttgatgttgttgcatgctgcaaaacgccgtggcaagaaggtcatcatgcatggtcattcgacacgtgaggactttgagaattcattcattggttctaaccttttggccccactttttgggaaatatttggcccacatgtaccaaaaggccgattacgtgattacaccgtctgagtattccaaaaaattgattcagtcttacggagttacgacaccaatcattgctgtttcaaatgggattgatttgaaaaaatacggtaaggatccacgtaaggaagaagttttccgagactactttggtatcaaggaaggacagccagtggttatttgtgcgggtctttatttccaacgcaagggaattgaagatttcgtcaaggttgccgaaaagatgcctcatgttcgtttcatttggttaggtagtatcagtaaatggctgattcctaagaagattcgagacattgtcaatggtaagcatcctgataatgtcagcttcccaggttatttcaagggagccgtcttccagggagccatgagtggtgctaatgctttctttttcccatcttacgaggaaactgagggaatcgtagtgcttgaagcctttgccagtcaccagcatgtggttttgcgtgatattcctgtttatgaaggctgggttaatgacaagtcggcttcattcgggcacaacgtggacgaatttgtagtagccttgcaagatattatcgatggtaaagtggacaaacgtgaagaaggctataaggttgcagaaagtcgctcgattgatgatgtcgcccaaaagcttgttgaagcctacaaagaagtattggagatttaaatgcgtatcggattgtttacagatacctattttccgcaggtatcaggtgttgcgaccagtattcgcacgctgaagacgcagttggaaaaaatgggacatacagtctttatctttaccaccactgatagagatgttgaccgctatgaagactggcagattgtccgtattccgagtgtgcctttctttgcttttaaggatcgccgtgtagcttatcgtggcttttccaaggcactagagattgctaaacaatataagcttgatattattcatacgcagacagagttttcattaggtctgctagggattgccattgcacgcgaacttaggattcctgttgtgcatacctaccatactcagtatgaagactatgtccgctatattgccaaaggtatggttatccgtccaagtatggttaagtacattgttcgtggttttatgagcgatttggatggagttatctgtccgagtgagattgtttatgaccttttgctcaagtacaaggttgcagctgaaaaacgtgtcattccaactggaatcgaacttgaaaagttccaacgtccagagattaccgaagatgatgtagcagacttgagatccaagcttggtatcgcctctgatgagaccatgttgttgagcctctctcgtgtgtcctatgagaaaaacatccaggctgtgctggctgctctcccttctgttttggaggaagacgacaaggtgcgtttggttgtagctggtgacggtccttacctaccagatcttaagtctcaagccaaaaaacttggtattcaggacaaggtggttttcactggtatgattgcgcctagtgagacagcactttattataagtctgctgatttcttcatttcggcatcaaccagtgagactcaaggcttgacctatctggaagccttggctagcggtaccccgattattgctcatggaaatccttatttggataatgtgattacagaccagatgtttggaacgctttattatcatgataatgatttagctggggccattttggaagcagccattgcaacaccagaaaaagacgaaactaagtgggctgacaagctttatgaaatttctgcggaaaactttggaaaacgtgtctatgagtattacttggaccttacgatttctaaggatttccacaatgatttgaatggtgaagatagtaccatgaaacgcttgacgcgtatggtaacttatttgccaactaaggctattaccttgcctgttaacggctctgttcgtatcctcaaaggatcagccaaacaggtcaagaaaatcagaaatatcacgaaactattggattaggaaagctaccagatttttctagtcagataaaatcttagaattgattaataaaagagataattagcttgaaaaattacagtttcatgctataataacgcatagagacatatcagtcatgggaaatctttcagagagcgtgtggcgctggaaatcacgcagaggacatgattgggactactcgattaactttttatgcaaacataaaacggtggccacgttagagccaatcagaggtgtaggacagactcgttttttgtcatacatgaactaaggtggaaccacgttgcgacgtcctttttaggatgtcgctttttatatttggcttaagcatatttaaagggctaaaccaaaattgaggggaggaggctaattgagtcgaaatacaatcctattttctaagacaggtgccatattattttatttggtaacatatatgttgttatttatctctctaatgttttgggatggaccggttaccattcttattagcctttatgccttagggataccgcttctagtttttggcattcccttttatagcatcctaatgcttactaagacaaaactaaaagttcagataggatacttgtgtagttcgactgcagcggtttatctttatagtgcattgacaacctatccaatacgtctatatccgattgtagatggaactacactccccttatggaaacatgtttttatagtcctatctcttatagggtttttaacttcctcaactcttctattgcgtataagaatgaaagagtttagaacatcaattattgatattaatttagattaattttaaggagaatatgatgattaacattactttcccagatggcgctgttcgtgaatttgaatctggcgttacaacttttgaaattgcacaatctatcagcaactctttggctaaaaaggcacttgctggtaaatttaacggtaaattgattgacacaactcgtgcgatcactgaagatggaagcatcgaaatcgtgacacctgatcacgaagacgctcttccaatcttgcgtcactcagcggctcacttgtttgcccaagcagctcgtcgccttttcccagatattcatttgggtgttggtccagccatcgaagatggtttctactacgatactgacaatgaagctggtcaaatttctaacgaagaccttcctcgtattgaagaagaaatgaagaaaatcgttaaagaaaacttcccatcaatccgtgaagaagtgactaaagacgaagcgcgtgaaatcttcaaaaatgacccatataaattggaattgattgaagagcactcagaagacgaaggtggtttgactatctaccgtcaaggtgagtacgttgacctttgccgtggcccacacgtaccatcaactggtcgtatccaagtcttccatcttttgaatgttgcaggtgcttactggcgtggaaatagcgataatgctatgatgcaacgtatctacggtacagcttggttcgataaaaaagatctcaaggcttaccttaaacgtcttgaagaagctaaagaacgtgaccaccgtaaacttggtaaagaacttgatttgttcatgatttctcaagaagttggtcaaggtcttccattctggttgccaaacggtgcgacaatccgtcgtgtcttggaacgctacatcgtggacaaggaagtagcagcaggctaccaacacgtctacactccaccaattgcctcagttgagctatacaaaacttcaggtcactgggatcactaccgtgaagatatgttcccaacaatggatatgggagatggtgaagcctttgtccttcgtccaatgaactgtcctcaccacatcgaagtttacaaacaccatgtgcactcttaccgcgaattgcctatccgtatcgctgaaatcggtatgatgcaccgttatgaaaaatctggtgcccttacaggacttcaacgtgtgcgtgaaatgtcacttaatgacggtcatactttcgtaacaccagaacaaatcaaagatgagttccaacgtacgcttcaattgattatcgacgtttacgaagatttcaacttgactgactatcgtttccgtttgtcataccgcgaccctaaagatactcacaaatactttgacaatgacgaaatgtgggaaaatgctcaaagcatgttgaaatcagccatggatgacatggaactcgactactttgaagcagaaggtgaagctgccttctacggtccaaaacttgatatccaagtgaagactgcccttggtaatgaagaaacactttctactatccaattggacttcttgcttccagaacgctttgaccttaaatacatcggagctgatggggaagaacaccgtccagttatgattcaccgtggggttatctcaacaatggaacgctttacagctatccttattgaaaactataaaggagccttcccaacttggttggcacctcaacaagtaactgttatcccagtttcaaatgaagcccacacagattacgcttgggaagttgctaaacaacttcgtgaccgtggtatccgtgttgaagtggatgaacgtaacgagaaaatgcaatacaagattcgtgcgtctcaaacacaaaaaatcccttaccaattgattgttggtgataaggaaatggaagacggaactgttaacgttcgtcgctatggacaaaaacaaacacacactgaagctgtgtcagaatttgtagaaaatatccttgctgatattgctcgcaaatcacgcccagatgccgaataattcagaaagtcggttagctaagctagctgactttttagtaggataaaccatgcacgtttttatgaaaagacttttatttctgctgggagcagtcctgctcttgttactgtctagctttacttatcacagattagccttgcaaagagagaaggcttccctcaaccctatgggacaaatggtgtctgtcaatggccatgacatgagcgtctttgtaaagggggaggggccacaaactctagtttttctttctggtgctggaacagcctctcccattctagattttaaagacttgtatgatgggctttcgaagcagtataagatagtcgttgttgaaaggggtggctatggttacagcgaggacacgtctaagtcccgagatgtttctgaggttctttcagagacacgtcaagccctagccaaggcccatgtatcaggtccttatattatcctctcccattcgatggcctccttagagacacttctgtggcaggaaaaataccctagtgaagtgaaagctatcattggtttagattgggccctaccagaaagttatgcacatttaacaatacatccccagattttacgtatggctcgttggggaagtcaattaggcttattaaggtatttaccgggtcgcttatatgtgcctaatgccaatctcagtagtagtgaccaccgcctctatcaacggatagcctatcgtcaaattttgtcaaaggctatgttaaatgagagcctgtctgttaaggaaaatgcgaaaaaggttacttctagcattgattcacaaattccaaccttactgatggtctcgaatggtgggggtactggttttagccagaaggactggcggcattatgcgactagctttgcaaaggaccagaaaaatatcgaagtgactttttatgatgctccgcattatctttatcactatcagaccaaagaggtggccgagaagatagaggagttcatcaaagagacgactgaatgaatttacatatattatcgaggagggatgtgatgctcattggttcaaaagcctttcgacacttatgggaggactggcgaagggactaccagccattgcaagtactaaagctattgttagcttatatagggatgccagaggatttatcgggagagcttgaagaaacccaacaccttttatcttattttgatcctgacttggcaccgcatgattccttctggaaggatgtcgttaaattggtagacctggcttttcctggtgatagtttgtctaagaatgcctctattgagagacaaatccatcagctacgttacctgatttctagtcaacaggctcagtatgtgcggacgcattataaaaagccagggatgacagataaagaagctttggctgtctatctgagatggaagcctttcaccatgtttgatcagggacgtttgcaccagaaggtttctatctgtgatggcaaggcggtttatcctgatgggattccaagtgttaatctaaaaattcttctctataatcggattgagtttattctggatagtcagggaaactttctcaatgaggtcgatgcggagcaggtgaccgagagtggggtggttaatggtgccagttttaactatggtaatttcaagcgccactggcaattggatgtggagccggtccaaccacatgaccctgattttcgtaatcgaatgactaggggctttcgttcacccaacaaattgaaaaaacgttggggacagcaagcgcctgaacagtttgataaatctttctacaatccaaaaggcatctatgctcagtctcataggtctttggcaaatgatgtcaaacgccaagccagactttttctcgctctggtttatggctttaaaccggatcagaccaagcaatcaaaggaggttcatatgtctaaacaaccacaaaacaataagggaacagcagttctaggctcactagtctttatggccttatacgccctaggtatttggcacaatgctgtccgaggaaatattccctttctcattctttggagtgttttactccttgttaatgtcagctattttattttccgcttgagaaaataaaaaagaaagtgatacagacctaaatagtaagaaatttaggtctgtatcacttttttgtatattcaatgataacttaccacttgctttcttctgggataataatccagcagatgatgtagaaaagaaagcctgttccgaataagaaaatcgctgcggcccaaatgaggcgaataatgacagggtcgatgtcaagatatttagcgataccagaacaaacaccggcaatgattttgttgtttggatctcgtctgagttcttttttcatatgatttacctccgtatgccttattataccataacacctagaagtctagtattagcttaaggaagcatgaagtagacgatacccagatattggagtgctgaagccagcatgatgaagaggtgccaaatcatgtggaagtatggttttttcttagcgtaaaaagctgctccaaccgtgtatgacaatcctccagcaagcatgagcccccaaaaggctggtcctgtcttagtgacgatagctggaatgataaagataaccaaccatcccatcatcagatagaggaagagggagaacttttcattgatttttttagcaaaaattttatagagaataccaaaaattgttgttccccattgaaggatgatgatgctatagcctagccaaccgccaaccaatgagagggcaacaggggtgtagcttccagcaatggcgatataaatcatgctgtggtcaataattcttagaaccatcttgtggggtgagttgtaatccatagcatggtagatggctgagctcaaaaacatgaggaataggctgataacgaaaacagacatcccgacagcagcagtcataccatagccgttgttggcatgaacagcagtaattggcagtaagactagcatggccacagcaccgacggcgtgtgtcacgctgtttgccacttcctcaccaaagctaagttttttactgagtttgaggttgggagaagtattaaaagtagcagtattagacattatttcctccttcaaggtcgttcaaaagttgatgggtagctcggtagcattgcagcgtctgacaggctgagagtatgacttgcggagcttcttgaggaaactgaccattcatacaggctacaaagtcattgtagtagctcttttggctttcagcatctgttcgtaggatttctaaggttttggcaatctcagaaatctcaaagacggtcttcagactagtgatgacaataagtctagctacctgagcagcattatattttttcttgatgggttttgcgacatggccatgtttgacataattattgaccatagaggcggttagccccttgtcgtttggtcccaaagtactttgggtgacctggttgacatagagcaaaacctgatccaaatagagttcaatctctggtaattcttcccagagagggtattgttgtgttgtcaaattataaaaacctctttatctagttttcataactagattataacattatagaaattcaagtcaagtcagaacttgtaagatatgaaaaagatgttgagataaaatttccaacatctttattttttatgtgataaggcaggttgattttttatgcttttggatcacttcttatggggttctgagtttctccaaaattgcttgtgcagtttcttggttcatatgtttggccttgagaagttcagccaaaacctgaggcatttcttcaggaatagccccagctaacaaagctagggatttggcttggagtttcatatgtcctgcctgtattcctgttgaagtcagagctttgagagcagccagattttgtgccaaaccaagagagacgatgatactggctagagttttggcatctggatgattaagcaagtcatgggcgatagaagcactagggttaagtccgatagaaccgccacgggttgcgattggcatggggagggataattctccaactagttccttagattcctgattataagtccatgtggacagacctcggtagctaccatccttgcttgcataggcatggctaccggcctcaactgctcgccaatcgtttccggtcgcgataactagggcatcgataccattgaaaattcccttattatgggtagctgctcggtaggggtccacctgagccagttggctggccatctccattttcttagccaggtcatgtgcctcttccttattacgactgaggaagcgtgtgctaagacgacaagtcgctgtcacaagactttcagtggctagatttgagagaatagccatgaggctttgaccttctgacaggttttctaattctggcaccagggcttccatcatggtgttgaccatattggctcccatggcttcttgggtatcaacggctagatagacaatgaggaagtctcctttagtctcagtccagagcttgcgagggccacccccacgcttaacaatagaagggtgagcctctttggcaatctctataaggtcctgactggctgcttgaattttgcttgaagcattatccttatcaggaacgtcaaagagggcaacttggccaatcatttgacggtcatggattgtagtcgtgaaaccaccagaacgcttaatgagcttgctagcgtaggaagcagcagccacaactgagggttcctcggtaaccatgggaacctgataggtcacaccatctaccaatacatctgggcaaatggcaaaggggagtgtgaatcgaccaatgacattttcagccatctgattggctgtttcaagggtgagttgttggtccttatccagaagatcttgattttcctgagacaaaagagcattcgttttcaaatgctctttacgttcttgcggtgtcttcttggaaaaaccagtccaagagagtttagtcatattaatgtcctttatagatacgttggtgttcagagatttcagctaaacggaaagctccggtttggtaatcagcgaattgagtagaaccagtgtcatccaactgcgcctcctcatagaaaagtttttcataatcagcaacgcttaattgttgacgtttggcaaaggtatctaggcggtccgaacgaagcaggtctttgtaaccttcaaccagacgtcctgagaaaatttcagagacagctccagaaccgtaagagaagaagccaatcttatctccggctttaaggtcttgcgactgttcaagcaaagaaagaagtccaagatagagtgaccctgtatagatattcccaatttgacgactataggtaattgaagcatcgaagttatttgtcagacgctctttgttctctggattcaaatcttttggaataatcttattaagtcccttaagagctagcttaggataaggaagatggagacaaaaagcagcaaaatcagcaaagttagcctgatggcgttcttgataagctacccaagttgtcttcaaactgtcaaggtactgtttggttgaatagatgccttgaacataaggcgttgaactgtagtttggacgccagaagtccatgacatcacgagtttgtgccacattatcatcagcaagttccaaaatacgtggattctgactgactagcatagctacagcaccagctccctgagttgactccccagaagatccgacaccatagcgggcaatatcactagcgataaccagaactttgctatctgggtgagttgccacatgcaacttagcatagttaagtccagcagttgcagcgtaacaagcttccttcatttcaaaagaacgagcaaaaggctgaatacctaaaagactgtggacatagacagcagcagccttagactggtcaatggaagactcagtagctacgatgaccatatcgatagcatttttgtcgtcgtcatttaaaatatcagccgccgcatcagaggcaagcgtcacgatatcttctgtaatcggcgtaatactggttgcatcaagcatcagccccttgctgaatttttcaggctccgccccacgggcaagagcgagatcagccatgtttagaacatattgactggtcgcaaaaccaatcttatcaattccaatagacatatgatgtttccttttttcttcattgtagagtatccagaagatactaatctatagtgattttaccataaaagagcgctttcgccttgaaaaaactttgatagttagttatatctcattttttgataggaactaggggattttacacgacttacatttgctattccatagcttatatttctcatttacaccagaataaggtaaaattgaaatggtaatctacttgttttttagctatgttagaaaagtaaaattgttgttatatattgaaatcattgcgagcgttaagtgagactttccgctgtgagataagtgtctgtaaataaagtgttttgtttacagacactcggaatttttgagaccataggctcaaaaattagtcttggaacttcgaagaagttcgcagacgtccgtaatcacttaagggaagtctcaaaaaatactttgttttcaatagaataaagaggaaaatcatgacaaaagcagacactatttttaaagaaaatatcactaaaatcatggaagaaggcgtttggtcggagcaagcacgtcctaaatacaaggatggcaccacagccaactccaaatacatcactggagcttttgcagaatatgacttgagcaagggagagtttccaattaccactctccgtcctatcgctatcaaatctgccattaaagaagtgttttggatttatcaagaccagacaaacagcctagatgtccttgaagacaaatacaatgttcactattggaatgactgggaagttgaaggtgtgcctgccaataatggagacaagcgttcaatcggtcagcgttatggagcggtcgttaagaagcacgatatcattaaccgtttgctggctcagttggaggctaatccatggaaccgtcgcaatgtcatctccctttgggattacgaggctttcgaggagaccgcaggacttcagccttgtgccttccaaaccatgtttgatgttcgtcgtgtgggcgaggacatttatttggacgccactttgacgcaacgctctaacgatatgttggtggctcatcatattaatgccatgcagtatgtggctcttcagatgatgattgccaagcactttggttggaaagttggtaaattcttttatttcatcaataacctccatatttatgacaatcaatttgagcaagccgaggaacttctcaaacgtcaaccctctgattgccaaccacgtttggttctcaacgttcctgatggaactaatttcttcgatatcaaaccagaagattttgaattggttgactatgaacctgttaagcctcaactcaaatttgacttagcaatttaataaacgttgataatttaagtccataaagagctggcaaagttttttccaagctctttttctctttttttgttagaatggattgtaaacttaaaaagaaaaggaaatactgtgtctaaacaactcattgctatttgggcggaagctcataaccatgttattgggaagaatcacaccatgccttggcatttgcctgctgaactggcacatttcaagaaaacgaccatgggctcagcaattctcatggggcgtgtgacctttgatggcatgaaccgtcgttgtctgccaggacgtgaaactttgattttgacacgagacaaggacttcgactgtgagggtgtaacgactgttacgagtgttgaggaagccctagcttggtttgaacagcaagataaggatctctatattgctggtggtgctggtgtctataaggcttttgatgggcattatgatgcactcatcaagacaactattgaggctgatttagagggagacacgtattttccacaactagatatgacggcatttaaagaggtatcacgtgaccgtgtggccaaggatgataaaaatgcctacgactttagcataagtcgctatgaaaaagaaggagactaggttcatgcaacgtagtgtttttgggttatttactgcattattgggagtactttgtgtgctctctgccattcctgcctttcgcaagaaacgttatgggttagcagtttttctctttttaaatgcttttaccaaccttgtcaatactattcacgccttctatggcaccctattttagaaaagagtgaggaataaatggctggaaatcgtaatgaagaaatggtttattgttcattttgtggcaaaaaccaagaagaagtaaagaaaattatcgctgggaatggcgtctttatctgtaacgaatgtgtggccttgtcacaagaaatcattcgtgaggaaatggcagaagaagttttggctgacttggctgaaacaccaaagccaaaagaacttttggatattttgaacaactatgtcgtggggcaagaccgtgctaaacgtgccttggcggtagctgtttacaaccactataaacgtatcaacttcacagaaagtcgtgaagacaatgatgtggatttgcaaaaatcgaatattctcatgattggaccaaccggttcagggaagactttcttggctcagaccttggctcgaagcttgaatgttcctttcgcgattgcggatgcgacatcattgacagaggctggttatgtgggtgaggacgtggaaaatatcctcctcaaactgatccaagcggcagacttcaatattgaacgtgcggaacgtgggattatctatgtcgacgagattgataagattgctaaaaaaggtgaaaacgtatcaatcactcgtgatgtttctggtgaaggggttcaacaagccctcttgaagattatcgaaggaacagtagctagcgttccccctcaaggtggccgtaaacaccctaaccaagagatgattcaaattgatacgaagaatattctctttatcgtgggtggtgcttttgatggtatcgaagatatcgttaagcaacgtcttggtgagaaaatcattggttttggtcaaaataataaggctattgatgatgactcatcatacatgcaggaaattgtggctgaagatattcaaaaattcggtcttatccctgagtttatcggacgtttgccagtccttgcggctctagaacagttaacggttgacgacttggttcgtatcttgacagagcctagaaatgccttggttaaacagtatcaaaccctcttgtcttatgatggggttgaacttgagtttgaccaggatgctcttgaagctattgcaagtaaggcgattgaacgtaagactggtgcacgtgggcttcgctctatcattgaggaagtcatgatggatgtcatgtttgaaattcctagccaagaagatgtgactaaggttcgtattaccaaagaagccgttgacggtacagctgctccagttttggaaacagcgtaaggaggacctatggctgaagaacaagtcctaaatacgcacaatgctgagattttgctcagtgcagcaaataagagtcactatccccaagatgaccttcctgaggttgccctagcaggacgctcgaatgttggtaaatcaagctttatcaatacccttcttggtcgtaaaaacctagcacgtacttctgggaaaccaggaaaaacccagttgctcaatttctacaatattgacgacaagctacgctttgtggatgtgccaggttacggttatgcccgtgtgtccaaaaaagaacgtgccaaatgggggaaaatgattgaggagtatctcgtgactcgagacaatcttcgtgtggttgttagcttggttgacctccgacatgaaccaactcaagacgatattcaaatgtatgaatttcttaagtattatgaaattccagtgatcgttgtggcgactaaggctgacaagattcctcgtggaaaatggaacaagcacgaatctatcattaagaaaaaactcaattttgataaaaatgaccatttcatcgtcttttcatctgtcacacgtgacggttatgatgaagcatgggatacgattttggcagaattgtaagaaaagctcggagaaatccgagtttttttcatgtgatagtctttaactatctctttgatagttttcacttattatccaaggggataatattgtgataagcttgttttatcacatatattggaggaatctatggaaaaccataattatgaaaatgagggtcagttccaacggaagatgacttctcgacacctctttatgctatcgctgggtggtgtcattggtactggtcttttcttgagttcaggctatacgattgcacaagctggaccccttggagctatcctatcttatcttgtgggagctattgttgtttacttggtcatgctttcattaggtgagctagctgttgccatgccagtaacgggatcctttcacacctatgctactaaatttatcagtccggggaccggctttacagtagcttggctttattggatttgttggacggtagccttgggaacagaatttctgggggcagccatgctgatgcaacgttggtttccatcggtaccagcctggatgttcgcagccttctttgcactggtgatttttgggattaatgctctaagtgtgaggtcatttgcggaagcagaatctttcttctcgtcaataaaagtcattgctatcctggtctttatcatcctgggtctgggggctatgtttggtttggtcagttttgatggtcaccgtgaggctattatgttcaatcacttgacggccaacggtctctttccaaatggtggacttgccattgtgtcagtcatgttggcggttaactacgccttttcgggaacagagttaatcggtattgcagctggtgagacagacaatcctaaagaggctgttccacgagctattaaaacaacgattggacgcttggttatcttctttgtcttgaccattgtggtcttggcctcgcttcttcccatgaaagaagcaggggtatcttcagcacctttcgttgatgtctttgataagatgggaattccatttgcagcggacatcatgaactttgtcatcctgacagctatcctttctgctgggaattctggactctacgcgtcaagccgtatgctttggtctttggccaatgaggggatgctcaataaaaagctagtgaaaatcaataaacatggtgttccaatgacagcacttttgatctccatggcaggagcagttttatcgctcttttcaagtatctatgcagcagatacggtttacctagctttggtatcaatcgctggttttgcagttgttgttgtctggctctctattcctatggcacaaatcaacttccgtaaacggtggaatttagagcattctgatgatgagttggattacaagacaccttttaatccaatcctcccttatattacaatcattctgttggctatttctgtgcttgggattgcttgggatagttcacaacgtgcaggactctacttcggtattccttttatgattttctgttacctttatcactaccttcgttttaagaaatggtaaggaggcctcgcatggcaatatttaaagattatttagagaataactctccccttattcttcacggagctctgggaacagagatggagaccttgggatatgatatttctggcaagctatggtcagccaaataccttcttgaaaagccagaggtcattcaagaaattcacgaaacctatgtagctgctggggctgacttgattaccacatcgtcatatcaggcgaccttgccaggcttgatggaggctggacttactgagaaagaagcggagcagattattgtcttgacagttcagttggcaaagaatgcacgtgataaggtatgggcagcattagatgagactgagaaggcaaagcgtccttatccattgatttctggagatgtcggtccttacgcagcttatttggctaatggttctgagtatagtggtgattatggtcaaattactatcgaggagcttaaggagtttcatcggcctaggattcaaattctcctagatcaaggtgtggacttgttagctttggaaactattccaaatcgtttagaagcacaagccttgattgaactcctggctgaagaatttccagaatcagaagcttatctcagttttacagtccaagaatcagccactatcagtgatgggacttctttagatgagattgccaagcttgtttcccagtcagaccaaatcttggccctaggaatcaactgtagttcgcctcttctttatgatcaggctcttgctattcttaaaaatgctggaaaagccctcattacttaccctaactcaggtgagatttatgatggcagtacgcagacttggaaacctaaggataaggatgctctaaccttagttgaacatagtaaagattggcatgctcagtttggagttaagattttaggtggctgctgccgcacacgtccaaatgacattaaagccttatataaagagtttagaacctagtcaaatttctaattatttgttataataggagactgtaaggctatgagctctacacattattagtagaaaatgaagccagcgttaagctggtttttaaaatgaagaggaaaatatgacctacgaacaagaatttctaaaagacttcgaagcctgggttgttacccaagttaaagtaaacgaaacggccttggccgctagcaagaaaatctgggaagaagacggcgatgaacgtgcacgtgatgcaagttaccgctatgaagctaaattggatgcttacaatttcctaattggtaagtttgccaactatcgtgctggcaaaggtttccatgatatgccagatggcttgttcggggaacgtcactattaatgaaggatgaaaaagaaaatggcgatactactttatagaaaggtatcgtctatcacaataggagaaaactaaacatggctaaagtaaaaaataaaaagaaagcttttaaacaccgtttgaaaagacaaggacttttcaataatgttaaagcccctgttccacccgttgcgcctgttccaccagtgccaccagtagcaccacaacctgttgctgaaactaagacagtttctaaggaagaagtggtagctacagaccttagtcttgaagctttcgcagaacttccagaagttgaaggccttcgttcaaaccttgtagaaactctttataatgaaggtttgacttcagtagaggcttttgctactgtgactgaagaagaagttcttgccctcaagggtgtcggacctgcgacagttaaaaaattgaaagaaaatggtgttagcttcaaagcttaagcctaaaaaagatccgaggtgtagccttcggattttttattgttttagaaagcattgcttgattagaaaaacaagaaaaccactagtaaatctagtggttagtaggtctggattgtttatttctttggattttgtttggttaaattaagtccaaaaggtaccaagttttcttgatgcctgcggatgcgccccatattttcagtgtggcggaagatgataagcaaagccatgatggtaagaaccccagtaaaaataaggtcatagccatctagtaagaaatggatggctggaaacacagctaaggtaataagcccaacaattgctgcagtgacacttgaaaatgaaatcatgctggttagatagagtgttagggcaaagaccaaaagtaggaatacacagtagagtggggcaaagccaagaagcacccctgcacttgtcgcaacggccttcccaccattaaatccagcaaagattggaaaaacatgtccgataatggcaaagaaaccaatgattagaggtgaaacctctgtaacaccaagccagataggtagcagaacagccaaggtccccttgaacatatcaaccaagaaggtgatggtaccagcagtcttacctagaacacgaaaggtattggttgttccagtatttccagagccatgctcacgaagattggtatggaagaatagtttcccaatccagaggccggtctgaatggaacctaacaagtaggcgattaggattaacaataagattttcatgagataattatagcatacagcctagtaattgacaaagtcagtcagccttaagatatcttttggactttcttgatttcttttgcaaattcttctgaaaacttataaaataataaggatgaaaattttggaggtcactcttggctaaaaaagaaataaatgtaaataattataatgatgatgccattcaggtactagaagggttggatgcggttcgcaagcgcccaggaatgtacattggctcaacggatggaacaggacttcaccacctagtttgggagattgtcgacaatgcggtcgatgaagctctttctggttttggtgatgtcatcgctgtcaccctaaataatgatggttccgtttctgtttctgactctggacgtgggatgccgacaggtatgcatgccatgggtaaaccaacagttgaagttattttcactgttctccacgcgggtggtaaatttggacagggtggttataagacttctggtggtcttcacggtgtgggttcttcagttgttaatgcgctatctagctggcttgaggtagaaattacccgtgacggtagtgtttatcgtcagcgttttgaaaatgggggtcaccctgtaacaggacttgaaaaaatcggcaaggcacctaaatctaagacaggtacaaaagttacctttatgcctgatgctagtatcttttcaacgactgacttcaaatttaacaccatttcagaacgtctcaaagaatcagccttccttcttaagaatgtcactatgacattgacagacttgcgtggcgaagaagaagttcgtgaagaattccactatgaaaatggggttcaagactttgtatcttacttgaatgaggacaaggaaacgctgacaccagtcatctatattgatggagaccagcaggatttccacttggaattagcccttcagtataatgacggttactctgacaatatcctttcctttgtcaataatgtccgtactaaggacggaggcacccacgaaacaggcttcaagtctgccattaccaaggctcttaacgattatgctcgtaagacgggacttctcaaagaaaaggataagaaccttgaggggtcagattatcgtgaaggcttatcagcagttatctcgctcttggttcctgaggaacaccttcagtttgagggccaaaccaaggacaaacttggatctcctttagctcgtcccattgtcgatagtattgtttcagagcacttgacctacttccttatggaaaatggagatctggcttctaacttggtgcgtaaggctatcaaggcccgtgatgcccgtgaagctgctagaaaagcccgtgatgccagccgaaatggtaagaaaaataaaaaagacaaggggctcttgtcaggcaaattgacgccagcccagtctaaaaatgctaagaaaaatgagctttatctggtcgaaggggattctgccggcggttcagccaaacaaggccgtgatcgtaaattccaggccattcttcctcttcgagggaaggtcctcaacactgagaaagccaaaatggcagacattctcaaaaacgaagaaatcaataccatgatttatactatcggtgctggagttggagctgactttaaccttgacgatattaactacgacaagattatcatcatgaccgatgccgataccgatggagctcacatccagaccttgcttcttactttcttctatcgttatatgcgtccactagtggaagcaggacacgtttatatcgctctgcctcctctttacaagatgtccaaagggaaaggtaagaaggaagttgtcgaatatgcttggacggatggggaacttgaagaacttcgtcaaaaatttggtcgtggagctattctccagcgttacaaggggcttggtgagatgaatgctgaccagctttgggaaacaactatgaatccagagaccagaacgcttatccgagtaactattgacgacctagcgcgtgccgaacgtcgtgtctcagttcttatgggagataaggcggcaccacgccgtcaatggattgaagataacgttaaatttaccttggaagaaagcggcgcattttaagttgcaggccagaagggaatgtaataagatagagttagggagagcgcttactatcaatagatacttgggattataaagaaacaagttgattattttctacatcgtttattaactatttgcagtgtcattgactagaaatcaatggaggtagaaaaatggattttaatgttatcgattacctagcttaccatgcagatgtagcttttcctgctattattcttatggttattgtttctaccatatacttaattttttatggcatacgacctataaaaacacgcttttttatcctttttcttctatctatagtttccctcataatcttcgtggtggataatcctctctattcttattttggaagtccatactcaggtttattatttgtgttttactatatgttgatcttttcagtgttttatgtgccattctcgctaatagcttttataaaaagtcttctacatttaatacgctttcaaaccaaatattcaatcttactagttattaatagtttctttgccacattactggctttcctcaatctgctctttttacaagggtctttgggatttctccctgcttcatctatgtaccttatttttcttctcctagcgataattggtattgttcaaactataataggaggaaaggaaaatgaaaaaaataaagactatattgctaagtcaggaaaagacagtatgaggtaaacctatgttatctaaggtattaagttttttactttactatcctcaagtggtgtttcctgtatgtgcaggggcaatagcttatttaagcgtttataaaaagagaccactaaaaacacgctttttgatcttgcctatactagtagtgataaccttccttctatctttgatagataatcccttctcacagatgacctacacggggttgttattggctttctactatgtctatgttttttctcccctaagtgttgtttgtagtatcacatctcttttaaaaagtatctatcattataagctattccgtatgccattagctctagttctcgtgatcaatggctccataatgaccggtctaacaattttaaaccttattttattctttggggaactttctacttcattgacactatcttgtgtatctttcattttaattgcgataagcacagtggttcaatttgtgattggtgaaatagaaactaggaaggtgaaaaccattcttctacagttacaaagtcaaggaacaacattgtaattagaggtgttgcagtgaagtagggggtctactatttgtcttttatattatttcaaatcattacttaaactaaaaaataaagagaaatcttatgtctaatattcaaaacatgtcccttgaggacatcatgggggagcgttttgggcgctactccaaatacattattcaggagcgtgcgcttcctgatattcgtgacggtctgaaacccgttcaacgtcgtattctttattccatgaataaggatggtaatacttatgacaagggctatcgtaaatctgccaagtctgtgggtaacattatgggtaatttccacccccatggtgacagttccatttatgatgccatggtccgtatgtctcaggattggaagaatcgtgaaatcttggttgagatgcacggtaacaacggttctatggacggtgatccaccagcggccatgcgttatacagaggcacgcttgtcagagattgcgggctaccttcttcaagatatcgataaaaacacagtcccatgggcttggaattttgatgatacagagaaggaaccaaccgttttacccgccgcctttccaaacctcttggttaatggggctacagggatttctgctggttatgccacagacattccaccacataatctggcagaggtcattgatgctgttgtctacatgattgatcacccatctgctaaactggataaattgatggaattcttgcctggcccagattttccaacaggggctatcattcagggtaaagatgagattcgcaaggcttacgaaactggtaagggccgcgtcgttgtgcgttcacgtactgaaattgaacaactcaaaggtggtaaggagcaaatcattgttactgaaattccttacgatgttaataaggcagttcttgttaaaaaaatcgatgatgttcgtgtcaataacaaggttcctggcattgcagaagttcgtgacgagtctgaccgtacggggttgcgtattgctatcgaacttaagaaggatgctgacagccaaaccattcttaactatcttttgaaatatacggatcttcaagtcaattacaattttaacatggtagctatcgacaatttcactccacgtcaagtgggcttgcaaaagattttgtctagctacattgcccaccgtcgcgatattatcgttgcccgttcaaaatttgataaggaaaaagctgaaaaacgtcttcatattgttgaagggttgatccgtgtcatctctattttggatgaggttattgcccttatccgagcttctgaaaataaggcagacgccaaggaaaatcttaaagtcagctatgatttttcagaagaacaggccgaagctatcgtgaccttgcaactttatcgtttgaccaatacggatatcgttactctccaaaatgaggaagccgatttacgtgagcagattgcgaccttggctgccatcattggagacgagcgtaccatgtttaatgtcatgaaacgtgaactccgtgatatcaagaagaaatttggtaatgaccgtcgttcagagctgcaagcggaaaccaagaccattgaaattgataccgcaagtttgattgttgaagaagaaacctatgtcagcatcactcgcggtggctatgtcaaacgtactagcccacgttctttcaatgcttcaacgattgatgaagtcggaaaacgtgatgatgatgatttgattctggttcagcaggctaagacgacacagcatctcttgatgttcactaaccaggccaatgtgatttatcgtccaatccatgagttgccagatattcgttggaaggatttgggagagcatttatcacaaaccatcactaatttatctaaggatgaagaagtgctttacgccgaaatcctggatgattttgaagctggtacttacctagcagccactaaacttggtcagattaaacgtttcgaacgcaaggaatttacgccatggcgtacctacaagtctaagtcggttaaatacgctaaactcaaggatgatagtgattttattgtcacagtcactccaattcaattggatgatatcatgattatcacacaaagaggttatgcccttcgctttaacgcggacgaagtgccagtagttggggccaaggcagcaggtgttaaggcaataaatcttaaggatgatgatatcgttcagtctgtttttgtggcaaatactcaaagtttctaccttctaacacaaagagccagtctcaaacgtgtggctacagctgacatcccacaggctaagcgagctggtcgaggtctccaagttcttcgtgagcttaagacgaaaccacatcgcgtctttacggctggtccagtctttacagaaaattctggtggtgagatagatcttctagcaacaccagtagaggaagctcctcagaccttgcttgtgacagccacgacaggtgaaattgcagaggttgatttatcccttctaaatctttcagatcgtactagcaatggaagttttattgaagggttggcagacaaagaagtcttttctgctaagattattgaaaaataatgataagaaagctttgttctcttactagagagcagagttttttctttaagagactaaagaactattttaaaaagaattgtcagaattttgcaacacaaccttgaaattttcaatgaaaaggactatactagaaagcacatagtaacagaaaagaggacatacacatgacagttgatttagactgggaaaatctaggatttaattaccgtaaacttccattccgttatatctcatatttcaaagacggcaagtggggcgaggggcaattgactgaggatgcaactttgcatatttcagaagcatctccagcccttcactatggtcaagaagctttcgaaggactcaaggcttaccgtactaaagatggctctattcaattgttccgtccagatgaaaatgccaaacgtttgcaacgtactgctgatcgtcttttgatgccacaagtttctgttgacaaatttgtagatgcatgtaaacaagttgtgcgtgccaatgaagaatacgttccaccatatggtacaggtgctacactttatctccgtccacttttgattggggttggtgatattattggtgtgcatccagcagatgagtatatctttactatttttgctatgccagtaggtaactacttcaagggtggtttggctccaacaaacttccttattcaagatgattatgaccgtgctgcgccacatggtacaggtgctgctaaggttggtggtaactacgcagcaagtatgttgccaggtaagattgcacatgaccgtaacttctctgatgttatctaccttgatccagcaactcacactaagattgaagaagtgggttctgcaaacttctttggtatcacagctgataacgaatttattacaccactcagcccatctatcttgccatctatcaccaagttctcattgcttcacttggctgaaaatcgcttcggtatgaaagctatccaaggtgatgttaagatttctgaattggataaatttgttgaagcaggtgcctgcggtacagctgccgttatctcaccaattggtggggtacaacatggtgatgacttccatgtcttttactcagaaacagaagtaggtcctgtaacacgtaaactttatgatgagttgacaggtatccaatttggtgatgttgaagcaccagaaggatggattgtcaaagttgactaattcttaatagtaattgattattttaaggcttgctcttgcaagcttttttctttttcggtagaattaaggagatacattaagaaaggatggctcgagccaagtatcgggtataaatctatgagtaaaaaagataaaaaaattgaaatccaaattaatgatgccaaagtagtcgtcaacaaggcaaccatcgaaggttttgaacttcttgttggcaagaaagtgattggacaaattgtggaaattgatagtaagtttgccgttgttgataaggaaaatgttgcaggtttccacaaaaaaatggatgatgcagtagctgccattattgaatcgtacaatcttaatcattaaaatccaaagtaaaggcttgctttggtcaagaaactgtgatatactatttcttgttcttaaggagagatagcgaagaggctaaacgcggcggactgtaaatccgctccttcgggttcgggggttcgaatccctctctctccatgtctaagaaactgaatcgggatagtcgatgtcaagtacttagatgtttttttatagcattttgctattggggtatagccaagcggtaaggcaagggactttgactccctcatgcgttggttcgaatccagctaccccagtaaaaggtatcgggtgcattggcaccgtctatgttaaccattgtctttgcgggtacctttaaaaatatattgttatcaagggtcagaattggctggctcttgttggaggatctttttagaatgaacgaatttgaagaattgctaaacagtgttagcgaagttaacacaggtgacgttgtaacagctgaagttatctcagtagataatgatcaagcaaatgttgttatcgaaggaactggtatcgaaggtgttttgacacgtcgtgaattgacaaacgaccgtgacgcaaacgttgcagaccttgttaaagttggtgaaacacttgaagtgcttgttcttcgtcaagttgttggtaaagatactgatactgtaacttaccttgtatctaaaaaacgcttggaagctcgcaaagcttgggataaacttgttggtcgtgaagaagaagttgttactgttaaaggaacacgtgctgttaaaggtggtctttcagttgaatttgaaggactccgtggatttattccagcttcaatgattgatactcgttttgttcgtaacactgaacaattcgtaggtcaagaatttgacgctaaaattaaagaagttgatccagctgaaaatcgtttcatcctttcacgtcgtgaagtggttgaagcagaagctgcagaagctcgtaaagaagtcttctctaaacttgaagttggttcagtagtaactggtaaagttgctcgtttgacaagcttcggtgctttcatcgaccttggtggtgttgacggacttgttcacgtgactgaattgtctcacgaacgtaacgtttcacctaaatcagttgtatctgtaggtgatgaagttgaagttaaagttcttgctatcgacgaagaagcaggacgtgtatcactttcacttaaagcaacaacacctggaccatgggatggcgttgaacaaaaacttgctgctggtgatgttatcgaaggtaaagttaaacgcttgactgacttcggtgctttcgttgaagtattgccaggtatcgatggacttgttcacatctctcaaatttcacacaaacgtgttgaaaatccaaaagatgttctttcagtaggtcaagacgttactgttaaagttcttgaagtaaacgctgatgcagaacgtgtatcactttctatcaaagctcttgaagaacgtccagctaacgctgaaggcgaaaacaacgaaaaacgtcaatcacgtccacgtcgtccaaaacgtcaagaaaaacgtgactacgaacttccagaaactcaatctggattctcaatggcggatcttttcggagatatcgaattgtaagaaaaaaagaggcatggaaacatgtctttttttctattttagagtatgctataatagtatactgttagcacccttagtgtaatggatatcacgtaagattccggttcttgagataggggttcgattcccttagggtgcaaaaaggaaaacgttgaaagatttgttcactcaacgtttttttagttgctaagttttagtgaaattattatgtaaaatcttttagtgttgaaaggaaaaaggcaaacatacagatgaatggttactagcttatcctaaaattaaagttgactactgtattagcgtctctatagtggatttattgggggagacagtttggttaatcttttgcaatttattaaagaatttgatataatactcagtatctcatattggggtcgttacggattcgacaggcattatgaggcatattctgcgactcgtgtggcgacgtaaacgctcagttaaatataactgcaaaaaatactaattcttacgctgtagcagcctaaacacctgctcgcgtgacttctagcagattgcttatgtttgtttagaggttttattgatttataagctacgtttgaccattgcctagctggttgaaaagagatttataggctcgcagatagaaggcttgagttatgtgtcgtctatctgttaaatgaaagacataacctatggttgtagacgaatatgttggcaggtgtttggacgtgggttcgactcccaccggctccataaatacttgaggcgtcagccttttatttgtgtatataggaatttattatgaaaaaacttttgtctttgaccgttttaggtctctcactttttactctagctgcttgtggaaaatcttcgtctaaaactgagtcgaagggatctctggataatgaggcttcaaagattttaactgttaagcatgggaatgttcgccagaactttgataagattaccatggcaaatgcttctcaggaattttcaggaggctcaaatcttgatagcttgaagggttggtttggtgaaccttcatcaacgagtcaggagcaggcaggagatgctaagcttgatgtttataattggcagtatgacaatgttgttgttacagcgaaactctttaacaatagcactgtggttaagtcaatttcaaacttttcttacgtccgtgatcctaaaatcacactgaagatgtacgaaaatctcaaaaatggaactagctatgacgatgctgtcaaaacgcttggtacacctgatgtttattcgattgcagtctcttcagatgcaacaatgacacaagcgctttggtcttcgaaccttgttgctaagaagggtgaaacaggtagccttacccttaactttaaaaatggtgccttggaaaacaagtcacaagcaaatttgattaataagtaatcgcagtaaaagatgcctttctaaatcaatgaaggcatttttttgttataataaaaggagcgattaaaattatggagatgtaatgaccaaaaaaagactattttttatagggatagccggtttaatactggtattcttatggcctcttttaaataacttcatccccttaatcaaggaatggaccaacgctaagcatgatcaagcctttttaagcaggctaatttccaaaatgcactgattcttcttagtctcatgattctgtcatcagctattcctggagtttcaagttctattttttgtatttttgttgggctactctatggccctttgcttgcgattccgatgaatattattggtaatacttttggaatttgactagttttgaaattctgagaagacttgaaaagccagagaagtccaaacgtatggagaaactcctaaactatattgaaaactttaagcatcgttttattgggatttctttagccttctctattccttttataccatcagctctggtcaattatgcttgtgttcagatgaatttacccacaaggacgaggattttggcaacccttattggagtgacgccagtctcgattgtttatgcagttagtggagatttgttgcttaatatccgtccgattcgaataccattagtggcagtacttgccatcttgctctttatctcactcgtcatttactttatccattttaggaaggaaaaaaatgagcttcattcaagtaactaaagaagaatttaacacacatgctcaacaagtgtctgagcgttcttttatgcaaacggaggaaatggctaagcttcttgaaaaacgtggatttagcattagctatgtcgcttggaaagaaggagaccagctagaagtctcagcaattgtctacagcatgcctatgactggtgggcttcgtatggaggtgaattgtggaccgattcactcaaatacagctcatctaagcgacttttaccaaggtttgaaggattatgctaaggaaaatggtgctcttgaactattaatcaaatcttatgatacttatcaaacttttgatagtaatggtgaaccaactagtgatgagcagaagcaattgattagtcaattgactgatttaggctatagctttgatggtttacagacaggctatcctggtggtgaacctgactggcactatgtgaaggatttatcagggattgaagaaaaagatcttatcaagtctttcagtaaaaaagggaaacctctggttaaaaaagccaaaaccttcgggattaagttgaaaaaactgaaacgtgatgagttatctattttcaaagaaatcacttcagcgacctctgatcgtcgtgagtatagtgacaaatccctagattattaccaagatttttatgatgcttttggtgataatgctgattttatggtggctaccttgaattttcaggattactatgaccatttggaaagtgatcaggcgaagttgggagctagaattgtcaaattacaagctgatttagaggctaatccaaaatctgagaaaaaacaaaaccaattaagagagttgtcaagtcagtttgagacctttgatgttcgcaagggcgaagcgactgcctttattgacaagtatggtcaggaagatattgttctggccggaagtctctttgtctatacacctcaagaagctgtttatctttttagcgggtcttatccagagtttaataagttttatgcgccagcactcttacaagagtatgtgatgacacaagccatcaaacgtggcattacgttctataacttccttggtattatgggaatctttgatggttcagacggagttctgcgatttaaacaaaactttaatggttacattgttcgcaagatgggaaccttccgctattatccacaaccgcttaaatataaagcgattcaaggcgttaagaaactgcttggacgttcttaaattttagagggctttgatttgagtcctctttcattatatgtctctatatgggcttgaaccattgtaaggagagattagaaattaaggaggtaagttgatgaaacttgcactattgggtacagggatgattgtgacagaggttcttcctgtgttaactactattgaaggaattgagcttaaagctatcatgtcgacaccacgatcacttgacaaagctaaagctttagctaagcaatatggtttggctcaggcgactagtgattatgaggagattttgtccaatccagaagttgatacgatttatgtgggaacgcccaaccatacccactatgattatgctaagaaagcacttttggccggcaagcatgttatttgtgagaaacctttcaccttacatttggaagagtttgaagagctggctaagcttgcgcaagaaaaagagcttctcttgatggaggctattaccaatcaatatttggctaattttacagcgattaaggaagccttgtctgatattggagatattaagattgtgaatatcaattattctcaatattcttcacgttacgatgcctttaagcgaggagagattgctcctgccttcaaccctgaaatgggtgggggagcacttagagatcttaatatctataatatccatctcctggttggtctctttggtaagcctaatcgtgtggaatatctacctaatgtggagcgaggagtggatacgtcaggaattctagttttggactatggtcactttaaggctgttgccattggagctaaagactgtagtgccgagattcgttcaactattcaaggagataagggagctattaccatttttggtgcaaccaacactctccctgagattggcgtcaccctcaatggtcagaaagagagagtcgtcaatctcaatagtctacaacatcgtatgcatgatgaatttgtggcttttgaaaagatggtggcgaccaaggattttgacagtgttgccaagcagttggaacatagtcgtcaggttatggaagttctggatcaagcttcgaaagctttgtaacatacaaaaaaacaagcagtggtattagccattgcttgttttgtcttatacagttgttgggaatgagatctcaatcaatttgtcagtgtgtactgttctgagtttgtccatcaaaacgatatccttgtcgatttttcgtttgaggaagaattcacggataacttctaattcattgtctttaacagcacggtgtttatttgaaatcaagagttcataatgcttaggtgcttgtgtaaagacaacatcagtattcccagcagagtaggtctctacgagaaaggcatccgtgttgtcaagttggttttgaacaagttcttggtgtgtacgggtcgtattaatgagtttcatagtttcctcctaggatttgccagttgttgtgttagtttctttccattgttcgattccccatttatgactgccacgtttaagtttagcaatggcttcgtcaattggaaaccaggccaggttattgaaatcttcgagaggtttgccaatttttgaaaaatctacaacttcataaatataggctggattgtaatagtaagtgtcacggtggcttgaatagaagtattcatcagcctggccatagtactggcctaaagtggctgtaaacccaagttcttcaattaactcgcgttctaatgcgctatagtgatcctcgcctgcttcgatctctccacctgggagaaaccaagctccgttaggagcctggactaaaataatctttgtcttttcttggttaggaatcacagcataaacaccgtaacgtgtttgataatgagctccctcaaccttgtcaccaaatgttggattcatgagttgctccttacgtttatttgcctatattatactaaaattttgctcattttcctattgatttaggcagaattagggataaatttgaaaataggaaataaaaagataaagaaaccaagccattgcgacttggtttctttatttaatcagtttcttttgctgtctcagctttctgagcagttttttcggcttttttagcagacttaatggtgatgtggccttttgaagtcatgactgccttgagatctttttcgtttggattttcaaggtagaagtcagtaatagcgtcttcaatatgatcttggatggtacgacgtagtggtcgagcacccatcttaggatcgtaaccaaggtcaaccaatttttccttaactttctcagttacactgaggtggataccgttattagccaagcgttggttgacattatcaagcatgaggtccacgatagtgaggagattttccttgctaagggcagagaattcgataataccgtcaaaacggttcatgaattcagggctgaagaaatctccaagctggttaagcacagaattggtacgattttcacgggcagctccaaagccaacgctagcttctactttacctgtaccagcatttgaagtcatgatgatgatggtatccttgaaacttacagttcgcccttgaccatcagtcaagcgaccgtcgtcaagaacttggaggaacatgtgaagaacgtctgggtgagctttttcaacctcatctagaagaatgagtgaataaggattacggcggactttttcagttaactgaccagcttcgtcgtaaccgacatatcctggaggggcaccaaccaatttagcgacagcgtgtttttccatgtattctgacatatcgaaacgaatcatactgtcagctgaaccaaagagttcaatagccaattgtttagagagctcagttttaccgactcctgtaggacctacgaagaggaagctaccaattgggcggtttggagcacccaatccaacacgattacggcggatagctttagcaatcttatcaactgcagcatcttgtccgataacatgtgatttaagatcatcggcaagactaagaagttgtgattgttctttttctttcaaatcaccgacaggaatattggttttttgttccacaatagcttcgatatgtttttcggtgatgacaggcatatcttggtctttgatggtttgcttttgcatttccttgtatttggcaatttggtcacggaaataggcagccttttcaaagtcctcgtcacgagtagcttgagccttgaggttttcagcctcaatcaaacgtttgtctatatctttaggatcaacaaagttgagggtcaagttcatcttcgaaccagcttcatcaagaaggtcgatggccttgtctggtaagaaacggtcttgaatgtagcggttggataattctgcagctgcagtaatcgcttcgtccgtatatttgacgtggtggtagtcttgatatttaggctgaatcccacgtaaaatagtgatggtttcctcaacagttggttcgtcaaccttaactggttgcatacgacgctcaagggcagcatctttttcgatgatgcggtactcgttgagtgttgttgctccgaccagttgaagttccccacgagcaagggcaggttttaagatgtttccagcatccatattgccatctccagcattaccagctcctacgatttcatggatttcatcaataaataggataacatcctgacgttgacgaatttcttccatgagtttttgcatgcgttcttcaaattggccacgaataccagttccttgaaccaagctgaccacatcaagacggatgacttgtttgccttggagtttttgaggaacgctaccatctacaattttttgagctagtccttcaacgacagcagttttaccgacaccgggttcaccgatgagaacgggattgttcttggtacggcggttaagaatttcgatgacacgaatgatttcctcgtcacgaccaataacaggatcaatgtctccacgacgagcgatgtcagtgatgttaatgccgaactcttcaagaagaccttgtggctgttgaggagcttgttggcgtggtcctcctggacggcctggcccttgtgtattgccaccatttcctcggttaccaccttcttgtgttggaggtgtattgggaagatctccgttagaagaacggaagttatttaggtcgctgaagaaatcatcgaagaagttggaacctccagtttgattgaattgattaagggggttctctgggtcagatttcatgattttataacaattttgacagaggtcaacttgttgctgattaccatttacattggtatacaaatgaatactagcttcattaaggttacagttttgacagagcatatcagtacctcttttctatctgaattgggaaagaccttttttgaaaatattcttggtcaaaaaaggtcaaatctatgactccattatagcatgcgggagatagattgcaagtaaaaagcatctagaattggcactctcttagcaggagtgctaatgttgaattttaattcaaaatcacttgtttgtaatgtataaatattatataatgtttttatattattcagaacgaaagagagatacctatgacacaagctaaatcctttttgaaagaaatcgactttaccaagcaagaactcgaggagttaattgatttatctttaaaatttaaacagttaaagaaggaaagaattccgcataaatatttagatggcttaaatattgccttgatttttgaaaaaacatctaccagaactcgctcagcttttacagtggccggtcaggacctaggtatgaatgtgacctaccttggtgctggagacattcagttgggtaaaaaggaatctgtagttgatacggccaaggttctgggatctatgtttgatggaatcgagtaccgtggttttaaacaagaagatgttgaagatttggccaagtactcaggggttccggtctggaatggtttgacggatacctggcatccaactcaaatgattgcggatttcatgactttgaaggaacacttcggtagtttggaagacttgaccatcgcctatattggagatggtagaaataatatggccaactcacttttggtcacttcggctattttaggtgttaatgtcaaaattattgccccagaggtgctgcaacccgaagatgagattgtagccttagctcagaaacataataatggtgccgacttaaccattacagatgatatttcagaggtcaagggagtggatatgctttatacggatgtctgggtatctatgggtgaagaggtagattttaaatctcgtattgatttactcttgccttatcaaattaatgcagacctactagccaagacagaaaatccagatgttatcgttatgcattgtctcccagcctttcatgatctcaatacccaaattgggaaagaaatctatgacaaatatggtttggcagagttagaaattacagatcaagtcttccaaaaatacagtgacatcatcttccaagaagctgagaatcgtatgcattctattaaagccattatgtacaattccttgaaaaatatttaaaattcccccatttttcccataagtgtgataaaataagtaagaaatacacaattaataggagaaataacatggaatcacatttggtgagaatcattaaccgtcttgaaatgatggcggctgatggtggtaatttgaaacgtaattttgaacgtgaaggagtggttgttgccgaagtatcatttagcaacgatcctgaaaatggtccagttttcacattgcgtgacgttgaagcacgtgaatcttattcatttgatagtatcgacttgattgcaatggaaatctacgatttgctttactaatatattattttggaactttacaaggttccaaaaatcagaatgcctgaaactatcgagtttcaggcatttttatcaggatgaaagcatggggtgatgcttgtatggcttgtcaaaacaggcagtacttcaaattcttggcaaagcttttggcgtggtgtcgtcttggaaatacatgaggtgtattgcttaagagttttgctagctaggtctataacttagtttttatactgaaatatcgcatttataagaaaatactttattattatacagtcttctgatataatattgaagaatattagtaaggagtatctagatgaatttttcatttctaccacagttttggtcttactttaactatggtgtcttagtaacaattatgatttcggtctgcgtggtcttcttcggaaccatccttggggttttggtatccttggccaagcgttctggaatcaaacctttggagtggttggtaagcctttatgtttgggttttccgtgggactcctatggttgtacagattatgattgcttttaacctcatccacatgaatcttccaactgttcagtttggcattttgaaccttgatttgtcacgtatcgttccaggtattatcgtcctttctttgaacagtggtgcttatatttctgagagtgtgcgtgcaggtatcgagtctattcctaaaggtcaggttgaagctgcctactcacttggtatccgtccatggaataccatgcgttatgtggtcttgcctcaagctattaaaaatatcttgcctgccttgggtaacgagtttgttactattatcaaggatagttcgctcttgcaaaccatcggagttatggaattgtggaatggtgcacaaactgttgcaacaacaacctacttgaccttgacaccgctcttgttcgcagccttctattatttgattgtgacaacggctatgacggcactcttgaaacaaatggaaaaacgacttggggagggacgtaaataatggcagaaacaattattgagattaaaaatcttcacaagtattttggtaagaacgaagttctcaaagggattgatctagatattaaaaagggtgaggtagtggttatcatcggtccttcaggatcaggaaaatctaccttcctacgctcaatgaacttgcttgagaaacctacaaaaggtgttatttcctttgaaggtgtggatattacagataaaaataacgacattttcaaaatgcgtgagaagatgggaatggttttccaacagttcaacctcttccctaatatgacagttaaagaaaatatcaccttgtcgccaattaagactaagggtgtttctaaagctgatgcagaagcaaaggctatggaacttttagaaaaggttggcttgaaagataaggcagatgcctacccaacaagtctatcaggtggtcagcaacaacgtattgcgattgcacgtggtttggctatggatccagatgttctcttgtttgacgaaccaacatcagcccttgacccagaaatggttggtgaagttcttgcagttatgcaggaccttgctaaatcagggatgacaatggcaatcgttacccacgaaatgggctttgcttatgaagtggctgatcgtgttatctttatggatggcggtgttattgtagaagagggcacaccacaagagattttcgacaatactaaggaagatcgtactaaggatttcttgagtaaagttttgtaagatattcattaagtatgtatacattgtttgtgaaggctggaacttttccggccttttctttttgtgttctgcttttctagaatcattcttgtttaggataaattttcggaaaagatggataaatatgctataatgatgccgtatcaaaaataataaagtaggtcaagaaaaatgctcatatatgatgcggccttaaaaaccccttaccggattcttggcattaacctccctaaggatagtcttttacacttatctaacctagggttggctgtcggtgaaatgattgaggtggtaactaagaccaagaacagtgctattattatcgtaaaggggagtcgcttagcctttgatgcttcgattctagataagattgatttggcacctgcagaggaagatcaggaaaaggtacctctttctgcattaccagttggacgttcggctatcgttactgatattttttcagcaaatgagaccaaacggcgtcttatggatatgggaattacaaagcgtactcgggtcttattgcgtaaggtagcccctttgggagatcctctagaaattagcttgagagggtatgaattaactctacgcaagtcggaagcgcaaatgattagtgtggtcatgctggatgagggagaggaaaaatgacagaaattgcattaataggtaatcctaatagtggtaaaaccagtttattcaacctgatgacagggaccaatcagcgtgtaggtaactggccgggtgttactgtagaacgaaaaagtggtctggtcaaaaagaataaggatttagaaatccaggatttaccagggatttattcaatgtcaccctatagccctgaagaaaaggtagcgcgtgactatttgttgagccaaagggccgacagtattttaaatgtagttgatgcgacaaatttggagcgtaacctttatctgacaacgcagttgattgagacaggtattccagtcactttagcacttaacatgagtgatgttttggaggctcagggaaaacaaattaatgttgataaattatcttatcatctaggtgtcccagtagtagctactagtgctctcaaacaaactggtgtggatcaggcagtgaagaaggcagctcatacaacgacttctacagtcggtgacattgcctttccaatttatgacgataagttagaagctgctatctcacaaattttggaagtcttgggaaattcggtgtcacaaaggtctgcgcgtttttatgccattaaactctttgaacacgatgctttagttgaggctgagttagacttgtccccattccaacgaaaagaaatcaaagatatcattcgtatcactgaggaaattttcacagaagatgcggagtcaattgtcattaatgagcgttatgcctttattgaacgtgtttgtcagatggctcaaagtcatacggaagattttgccctgaccttgtcagataagattgataggattgtcaccaaccgtattttggccttgccaattttcgcagcagttatgtatttggtttatttcttatctatccagactgttggaaccatgtggacagactgggctaacgatgtgctttttggtaagtatgttccagatttggtaacttctggtcttgactttcttcaagttcaggactggcttaagtctttgattgttgatggtatcgtcgctgggattgggacagtactaggattccttcctcaaatttttgtgctctttatctgtttgggtgtgcttgaggatgttggatatatgagtcgtattgcctttgttatggaccgtattttccgacgttttgggctttctggaaaatcctttattcccatgttgatttcgacaggttgcggggttccagcggttatgtctagtcgaactattgaaaatgaaagggaccgtcgcattaccattatgacggcaaccttcatgccttgttcggccaagttggaaataattgccttgattgctggagctttcttccctagtaactcattagtagcaccaagtacttattttattgggatggctgccattatcttatcaggtattgccctcaaaaagacgagttttttgggtggcctaaccagtccgtttataatggaattgcctgcttaccattggcctaaagccatgtcagttttgcgctatgcctttggtaaggctatgagttttgtcaaacgtgcgggaaccatcattttcagtttgacagttcttatctggtttatgtctaactacaactttacgctacatacggtagatacggaagccagcattttggcgactctcggtaggagtttgtcttggatttttgatccgcttggatttggaaattggaaggcaacagttgcggctcttacaggcttagctgccaaggagactgttgttgccacctttggtattctctatcataatagcagtgaagctggtttagctgaggctttacgaggagattattcttccctagcagcttattccttcttagtcttcaatttactttgtgccccatgttttgcggctattggagctattaagcgtgaaatggccaatcttaaatggacggttggtgctatcggttttcaaacaggcctagcttattgtgtgagtttaattctttatcagtttggccaagttatcctatacggcaagtcaatgacaatttggacttttgttgctttcttgctgttagtgaccatgatttattttgtggttcgtaaaccacgtcagattaaggatcaaatcattagcttagagaatcttcaagaagcccatatttaggtttaggaggaattgttatgtcaacgtttatcattgccttcattatttttgctttggctggtcttggcatccgtcactatatcaaaggaaaaggttcttgtggcgattgtgagtgttcttgtccggttaaggaagaaatgcataaggctaatcgctaataatatatagaaaaatggtctcttaaatgaataagagaccattttcttacgattgtaagaaatgtataaaggtatgtaggttagaagtatgatactataagatagataaataatctaaatttttaacaaaaaagggagatgtataaggaatggttttgaacagagagattgtcctaattcatgggacctggtgtgatggcaatgtttggggagaatttgcgacaggtctacgtcaaatgggatacaaggtgcatacacctagctttcgttaccatgacctaccttatcaagagtgcctagctaaagttgggactgttaccctgcaggactatcgagatgatttagtggctttgattgaaagtctagaccaaccaccacttattttagggcactctttaggctgtctggtggctcaaatggttgctgaaaagacagaagttgctggtatgattctcatgggacctgctccgacagcagatatttatgccttttatccaaccatgttagcttgttttggcaaacactttttacgctggggtttttggaaaaaagccatgcccccttataaaaaggagtttttcaagtattgcatgaatgaacaagaggaagctttgaaagaggaagtttttgctaatctggttcctgaatcaggaaaagtttatactcaaatggctcttcattggtttgataagacaaaggcagcttatgtggactttagtaacattttatgtcctgttctcgtcatttcaggaaccaaggataagatgactcatcctaatattgctagaagaacagctaagaactaccgtgattctgttcttgtttccttaacaggtgcagatcacatgtatgaaagtggcaaataccagcagaagaccttgaaggttattaagggttggagtcagcaaaatggttttgtggattagtcacgaaacataatcaaaagaagttggaaggcaattccagcttttttagttttcatttgaaacgtctttttgaaaatttagaaaatttagtcacaaagagtcctcactatggtataattgaaaaaaagtatgtattggagaacactcatggcgataataatggatggtaaggccctagctgctaaaatgcaggatcaattgcatgaaaaggtagcacgtctaaaagaaaaggaatggattgtgccaggactcgtagtaatcatggtcggtgataaccctgccagtcaggtttatgtgcgaaataaggaacgtgctgctaaaaaggctggcttccatagtcagacggtcaatctttctgagagtattagtgaggaagagttgattgaagttattgagcgctataatcaggatccgcttttccatggtatcttggttcagttgccactgccgaatcatattaatgaaatgcgtattcttttggctattgatcctaaaaaagatgtcgatggtttccatcctatgaatactggtaatctttggaatggtcgccgccaaatggtgccttgtacaccggctgggattatggaaatccttcgtgagtacaatgttgaattggaaggtaagacagcagttattatcggacgtagtaatattgttggtaaacctatggctcagcttcttctagaaaagaatgcaacagttaccttgacccactcacgaacaccgcatttggctaaggtttgtagcaaggcagatgtcttgattgtagctattggacgtgcaaaatttgtaacagaagaatatgtcaaagagggtgctgttgtcattgatgtgggaatcaaccgtgatgaagaaggcaaactttgtggtgacgttgattttgatcaagtgaaagataaggttggcatgatcacgcctgttccaggtggtgtaggccctatgactattactatgttgatggaacagacctatcaagctgctcttcgtagtgcgaaaggatagtttatgaaagttgatgacgatttagctaggcaagtgataacacctcgcttgagagagtctcacaagggttcttacggtcgagtgcttttagttggtgggctttatccttatggtggtgccatcattatggctgccatagcttgtgtcaatagtggggcaggcttggtcacagtggctacggatcgtgacaatatcacagcccttcatgcccatctccctgaagccatggcttttgaccttagggagactgaaagatttcttgataatcttagggcagctgatgtggtattaatcggttctggcctaggtgaggatggtgtagctggtcaagctatggacttggtgttagcaaatattagggcaaatcagaacttggttgttgatggctcagctctcaatcttttggctaagaagactaagaaggacttaccagattgtcaccttactctcaccccgcatcaaaaagaatgggaacgcttgtctgatttaaggattccagagcagacagtctctaacacccagaaagccttgggagagttccaagctgggacaatcctagttgccaagagtcacaagaccgctgtctatcaaggtgaaacagtagctcatttagaagttggtgggccctatcaagctacaggaggcatgggagataccctggctggtatgattactggttttctggcccaattcgcttcaattgactcctataaagcagttacagttgctgtctggcttcactcagctatcgcagatgatttggctaaaaacgcctatgtggttttaccgactcatattagtaaagccattcctagctggatgaaaaagttgtcattataatataaaaaacatgtctcatattgaggcaagtttttttagatttcgacatttttttaagtttgctaaagcttatttgtgataaaataaaagagaatttttatgagaacatagaggaaaaaaagtgacatcattttcgaaaaaactcagtcaaaaatgggaaaaacggcgccaaaaacgaaaagaaaaacgagcgaataaacctagaaagccagtaaacatctcccgtcgtgtttacttgctttttggtgtagtctttgtcctttttttgttgctttttgcacgtttgacctatatgcaggtttataacaaatcgttttatacgaagaaattagaggataattctaagtatacagttaggattgcaagcgaacgtgggcaaatctttgatgctaaaggggttgccctcacgaccaaccagagtaaggacgttattaccttcacacgtagcaatttggtgtcatcagatacgatgaagaaggtcgctgaaaagttggcgaccatggtgactctgacggaaacgaaggtaacagcacgtcaaaaaagagatttttatctagcagattctgccacttataagcgtgttgttaatgatcttccaaacgacaagaaaacagataaatttggtaataaattagctgaagctactatttacaacaatgctgttgatgcagttcctgatgaagcagtggattactcagaggatgagcttaagattgtctacatttactcacagatgaatgctgtttctaatttctcaacagtcacattgaaaacaggagatttgacgcctgaacaaattgcgattgtagcagctaaacagaaggaactcaatggtattacggttgctaaggattgggaacgccatacggttgattcagccttgtcacctctcattgggaaagtctcaagctcagaagcaggtttgccacaagaagatgccaaggaatacctcaaaaaagggtatgctcttaatgaccgtgtaggaacgtcttatctagaaaaagaatatgaggagaaactacaaggaaaacatactgttcgtgagattacagtagacaaggaaggcaaagttgctagtgataaaatcactcaaaagggaagtaagggtaataatctgcagttgaccatcgaccttgatttccaaaaaggagttgaagatatcctagggcaacaactttcttcagagatttctgagaataaagcaacctactctgagggaatgtatgccgttgttatgaatgctgacactggtgctgtacttgccatggcggggcaaaaacatgaacaaggagcacaagattttaaagcaaatgccttaggaacaatcactgatgtctttattccaggatctgttgttaagggagcaaccctaactgctggttggcgttcaggtgccatttatggaaatcaggtcttgactgaccaaccaatcaacattgctggttcagcctcgattacgtcttggtttacagatcaaggtagccgtcctattaccgcgacacaggctctagaatattcatcaaatacctatatggtgcagattgcaatcaaactacttggccaacaatatgttccaggcatggccttgtcgactgacaatatggataaggccatgacgacacttcgtgatacctacgctgattttggtatgggggtatctacaggacttgatttgcctggagaatcagaaggttatatttctaagaattacaatgtagccaacgtcttgacagaagcttttggtcagtacgactcttatacaactattcaattggctcaatatgttgcttcaattgccaatggtggtaaacgtgtagcacctcatattgtgggaggtatttatgatgctggtactaatggtagcttaggaactctagcttcaacggtagatacacgtgtattaaataccttacctcttgattctgagcagatggggattatccaacaaggctttaatgatgtcgttaattccggttctagccttgcgactggtaaagctatggcaagttctatcattccaatcagtggtaaaacagggacagccgaaacctatgcgacggatgcttctggtaactctgtaacaacggttaatcttaatgccgttgcctatgcgaccgctaaagatggtacgaagttggcagttgggattatgtacccacatgctctagattggaagagtaaggcccatcaaaatgcagtcaaagctattatggagctttaccaaaatacccactaaacatctaaagtctcttgtgccttgcacgagggatttttctgtgatatagtgtttgagtatttgttcttggctaaaggcttatccatgaaagtgacaaaagataagcgatgaataaaaaatataaagaacaggaggccttcatgctttatcctactccaattgcgaagctgattgatagtttttcaaaactccctggaattggggctaaaacagcgacacgcctagctttttataccattagcatgtctgatgaagatgtcaatgatttcgcaaaaaacctcttggcagcaaaacgtgaattgacttattgttcggtctgtggtcgtttgacagatgatgatccatgtaatatttgtaccgatgaaaccagagatcgtactaagattttggttgttgaagattccaaagatgtttcagctatggaaaagattcaggaataccgtggtctctaccatgtgcttcaaggacttatctcccctatgaatggtgttggaccagacgatattaacctgaaaagtttgattactcgccttatggacagcgaggttgacgaggttatcattgccactaatgcaacagcagatggtgaggcaacatctatgtatatttcacgtgtcctcaaacctgcaggaatcaaggtgactcgtttagcgcgtggtttggctgtcggttctgacattgagtatgctgatgaagtgaccttgctaagagctatcgaaaatcgaacagaactataagtaaaaagtgttggtcagtccagcactttttgtttgtagtaagtaggtttctcattaaaaatttggtaaaataaagtaagcgcttttataacgagaaatcatgatgcagattgaaaaggttttaaacaacaatgttgtccaagctttggataataatgtggaatacattgtcatgggtaagggactaggctttcaaaagaaggtcggagaccttgttgataaggaaaaggttgaaaagacttttgttttggaaaatacagaggcagtagaggaatggtctcgtgtttatgtcaatttacctgatggtgaaatgcaagtctttttgaatattcttacttttgctgaggctgtcttgcaaaccaagtttgaaccctcttttttcatcgctcttgcagaccacctacattacgctattgaaagaagtagagagggtatttctttgcagaatcctttggcttgggaggttcgaaaattttatcctcgggagtatgaaattgggaaacaagcccttcgtttgattgccaaggatttagaagtccagttggcagatgatgaggctgcctctgtcgccttacattttgtcaatgcacaaaaagatgcgggtctccatgaaaaagaccgacagatgactcaaattgtggttgggattagtgagattgtccgtcttcattttagttatgatttggatgaggaaagtttctcgtataaccgctttatgacacatctccaatacctagcacaacgtattgtgagtggggttagtggtggcaagaatgatgcttttctatatgaacaagttaagataaattatccagagtcctttatctgtacccaaaagattgctacctatatcaagacaagttatgcttttgagctaagtttagacgaacaagtctttttaaccattcacattcaacgtcttaaggataatttagataagtaagcgattcccagagatgtcctacaaaaagcagacaattagccttaagtctgctttttctgtgtccttatgatataatgaggtgattaatattagaccaaaaatactctgggctagtattctatgtatttgtataaaaaagctaatgagttagtgaaaggaagcgagcggttctatgtttgaagtgagcattgccgttcctaaagtatcttatgtatattgaaatgattgatgagactggacaagtctctgagaaattaaaagaacaaaccttggagttgctagattttgcagcacaaagacttggcaaggaagacaaggaaatggcggttacatttgtaaccaacgaacgtagccacgagctaaacctggaatatcgtgatacggaccgtccaactgatgttattagtttggagtataagcctgaattagacattagctttgatgaggaagagttggctgaaaatcctgaattagctgaaatgatgggagaatttgatagttatatcggtgaactctttatttctgttgataaggctcacgagcaagctgaggattatggtcatagtttcgagcgtgagatgggcttcttggctgttcacggttttcttcacatcaatggctacgaccattatactccagaagaagaagcggaaatgtttggattacaggaagaaattttgactgcttatggacttacgcgacaataacccacaaaaaaagtggaaaaacagagaatttacagctagttttgagtttgctctaacaggaattatcacagcttttaaagaagaacgcaacatgcgcaagcatttggtttcagctatcttggtggtattggctggcttgatttttcgtgtgtctgcgacagaatggctctttcttttgatggcagtttttctcgtaattgccctagagatcgttaattctgccattgaaaatgttgtcgatttggccagtaattatcacttttcgatgctagccaaaaatgccaaggatatggctgcaggggctgttttagtggtttcttgttatgcactcattacgggtatgattgtttttatacctaaaatttggcacttaattttcaattaaaaagaaataggaaagaagttatatgacatttaaatcaggatttgtggctattcttggccgtcctaatgtaggaaaatcaacgtttttgaaccatgttatggggcaaaaaattgctattatgagtgataaggctcaaacaacccgtaataaaattatggggatttacacaactgataaggaacagattgtctttattgatacaccagggattcacaaacctaaaacggctcttggggatttcatggtggaatctgcttattcaacccttcgtgaagtagataccgtcctctttatggtaccagcggatgaaccccgtggtaagggtgataatatgattatcgaacgtcttaaacaagctaaggttccagttatcttggtaatcaataagattgacaaggttcatccagatcagctcctagagcagattgaggatttccgtacacaaatggatttcaaggagattattccgatatctgctctccaagggaacaatgtttctcatcttgtggatgtcttgagtgataaccttgaggaagggttccaatatttcccagcggaccaaatcaccgaccacccagagcgtttcttggtatcggagatgattcgtgaaaaagtccttcagttgacacgtgaagaaattccacactctgttgcggttgtcattgatgagatgaagcgtgatgaagacacggataagattcatattcgtgcgacgatcatggttgagcgtgacagccaaaaaggcattgtcattggtaaacaaggttccatgctcaagaaaattggtacccttgcccgtaaagatattgaagttatgctaggggacaaggtcttccttgaaacctgggttaaggttaagaaaaattggcgtgataagaaattagatcttgccgatttcggatacaacgaaaaagaatattaaaaagctgggcatttgctcggctttcttgttagaaggaggagcaaatgcctgagttacctgaggtagaaactgttagacgagggttagaaagattggtagtaagtcggaccatttcgtctgttgaagttaaggtcccgaaaatgattaagacctcctacgatagttttttgaatgacttacctggccaaactattcaagccatgcgacgtagaggcaagtacttgatttttgattttggacagttgattatgatttcccacttgcgcatggaagggaaatacctcttgtttacggatcaggtccctgctaataagcatttccatcttttctttatcttagatgatggctcgactcttgtttatcaggacgtccgcaagtttgggacctttgatttattggctaaaaatcaagaggaggcttattttacaaagaaaaagcttggtcctgagcctactaagaaggcttttaaatacgccccgtttgagagagccttgatgacctctgcaaagcccattaaaagtctccttttggagcagaaattggtggctggtctaggcaatatctatgttgatgaggtgctttgggcagccaaggttcatcctgagacgccagcaaagaaactcagcaaggcagccatgaagcgagtccatgatcaaacgattgttattttacagctaggaattgaaaaaggtggctcaactataaggacttatcgtaatgcccttggtgaggatgggaccatgcagaactatttgcaggtttacggaaagacgggacagccttgtccacgctgcgcaagcacaattgagaaaatcaagttaggagggagaggaacacatttgtgtcctcattgtcagaaacgatgattattgggttaacaggtggtattgcttcaggaaaatctactgttgttgaaatgattaaagaggcaggttacaaggtcattgacgctgatcagcttgtacacgacatgcaggctcaagggggccgtttgtaccgtgccttactcgattggttgggagaggaaattcttctttctaatagggaattgaaccgtcctaaactagggcaactgatcttttccaatgaggagatgagacagcggtctgctgagattcaagggacgattattcgagaggaactagcagcgcaaaaggattatttagctaagaaagaagatgtttttttcatggatattcccttgcttattgagaatgggtatcaggactggtttgatcagatttggttggtggcagtgttaccggagatccagtgccaacgcttgatgaaacgtaatcacttaagtgttgaggaagctaagctgcgtattgatagccagatgtctttagctgagaaaatgccttatgccagcttggttcttgataataacggtagtctcgatgatttgaaggagaaggttaagagtgcaataaatgatttaacgagctcctcatagctagccattgtgatataatggatagtgaattttagaaagaagatgattatttgcgccaaaaagaacttaaaagtactgattggcaacgtaaccttaaaattgcatggataggaaccttttttactggagctagtttctccattgttatgcctttcatggccctatacattgaggaacttggtgttaaaggagatatggtcgaatggtatgctggcttgtctgttgccatctctgccttagcctctgccttggtttctcctatttggggacgcctggctgaccgttatggtcgaaagcctatgatgattagggccagcatggtgatgacttttacaatgggagggcttgccttagtcccaaatgttttctggctgcttttcttaagaacgctgaatggtttgtttgcaggctatgtcccaaatgccacagctttaattgctagtcaggttcctcagaatcgttctggctatgccttggggaccttgtctacgggtctaacggcaggtgttctgattggccctttgttaggtggtaccttatctgaggcgtttggtatgaggggtacctttttattggttggactcattctatttatctgctgcctcttaactatttttggcttgcgagaggatttccagcctgtcgaaaagggagagatgatgaccctttctcaggtttttgcaagaattcccagcaaatctatgttgattggcctttttgtgaccagtatgattattcagatttctgcccaatcgattgcacctatgttggccctttacattcgttatttaggtcagagggaaaatatccttttttactcagggttaattgtttctgctatgggcttttctagtctcttaagtaccccttatctgggaaaattgggagaccgtattgggaatcatcgcttgcttttaatggggctattttatagctttctcttgtatttcctctgtggttttgccggttcagccttgcaactgggtatcttacgctttgcctatggcttcggtgtaggtgctcttatgcctagtgtcaattctttattgaccaagatgacacccaaggaaggaatctcaagaatatttagctttaatcaaagcttttcatatattggacaggttttaggtccctttgttgggtcagcagttgcgacaggtctaggttatcgctgggtcttctttgtgactgcaatgattgtctttggaaattttgtctggtccttaatcatctttagaaaattgctaggagtcaagaatataggtgagagttaaaatcaatttaaagtgtagtgaatgtgggagcatcaactatctcacaagtaaaaataaacagaatcatcctgagaaaattcaggtacccaaattctgccctaaggatagaaaagtaaccttacatgttgaatcttaaagggttctatggtagaataaaaaggactttttcggaggaataactatgtacgacttattattaacgctgctcttggtgatgtcagctattattgtgattgcggtatttatgcagccacaaaaaaatccaagtagcaatgtctttgatggtggtgggtcagaagcactatttgaacgtagtaaaccacgtggttttgaagcctttatgcaacgctttacaggaatcatggtttttctatggattgtagatgcaatcgtcctttccattctctcaagtaagtaatgagctgactgaggttggctcattttttgcgttatagtcaataaataaaagaaaaggaaatcatgaaagaatctattataaattatttgaaggagcatgggaaatccagtgtaaacgacattgcccaggctcttaatcatgctgggggtgaaaagttccctcagctcatcaaggccatatcagccatggaaagtaagggacagttgcgttttaaccgagatggctctgtatccttgcgtcctaagaaagaaaatcctaatcaggtgactgttgaaggtgtcttccgtgccaataagaacggttttggttttttgcatgtcgatgacagtgaagatgatatgttcatcggtcgtaatgatgttggccatgctattgatggtgatactgttgccgttgtcatcaagaagccagcagatcgtttacgagggacagcagcagaagcacgtgttgttgaaattgtagaacgttcgcttaagactgttgtagggaaatttatccttagcgacgagaaagaaccctatgcgggttacattaagtctaaaaaccaaaaaattcagcagccaatttatatcaagaaagaaccagttgccctagatggtactgaaattatcaaggttgatatcgaaaaataccctaaccgtcactatgattatttcgtaggaagtgttcgtgacattattggtcatcagggggatgccggtattgatgtcttggaagtcttggaatcaatggatattgtttcagagttcccagaggatgtcatggcggaagcagaagctgtcccagatgcaccgagtcaggaagacctcgttggtcgtgttgaccttcgtcaagaagtaacctttactattgacggagccgatgctaaggacttggacgatgcggtccatatcaaacgtttgccaaatggtaactttgagcttggggttcatattgccgatgtttcctactatgttactgaaggatctgcacttaaccgtgaggctgtagcacgtgggacttctgtttatgtgacagaccgcgtggtaccaatgttgcctgagcgtctttcaaatggtatttgttcacttaatcccaatgttgaccgcttgacgcagtcagccatcatggagattactcctaaaggtaaggtggttaatcataagatttgtcaatctgtgattaatacaaccttccgtatgacctacagtgatgtcaatgagatgttagctggaaatctagaaaagattgagcagtttaagccaatcatggattctgtatcagctatggcagaattgcataagattttagaagacatgcgtgagcgtcgtggtgcccttaactttgatacatctgaagctcgtatcttggtcaatgagaagggaatgccagtggatatcgtggtgcgtgaacgtggaacagccgagcgaatgattgaatccttcatgttggctgccaatgaatgtgtggcagagcactttgctaaggctaagttgccatttatttaccgtatccacgaagagccaaaggctgagaaattgcaacgtttcatggattatgcctctatctttggtgttcaaatcaaagggactgccaataagatggatcaactagacttgcaagagtttatggccaaagttcagggaaaacctggagcagaagtcatgaacatgatgctgcttcgttcaatgcaacaagctcgctattcagaacacaatcacggacactatggacttgcggctcagtactatacccactttactagtccaatccgtcgttacccagacctcttggttcaccgaatgattcgtgagtatactaacaatatgtctcaagagacgcgtgaacattttgaagaggttattcctgagttagcgacatcatcttcaactcttgaacgtcgtgccattgatgccgaacgtgtcgttgaagctatgaaaaaagcggaatacatggaagagtttgttggccaagaattcgatggtattgtcggaagtgtggttaaatttggtatgtttgtggaattgccaaacaccatcgaaggtttggttcacatcacgacccttccagaattttacaattacaatgaacgtaccatgacacttcagggtgagaaaactggtaagactttccgagttggtcagcctatccgtgtcaagttaacacgtgcggataaggaaaccggagacattgacttccaataccttccaagcgagtatgatgtcactgaaaaagtagatcacaaggctcgtcaggaacgtgaagaaaaggcaaaagccttccgcaatagaggtccacgtcgtgaccgtcaaaatggagacttcgaacgtcgtggtaaacgtggggataaccgtaaccgtcaagacggtaatggtcgtaaaggttcttatgacgaaaaacgtaagtcatctaagaaacccgacaagcgtaagaatcaaaaccgtcctcataatgataacaagggacgtgagagtggccgtcgtaagaagaaagggaacaaacctttctacaaggacgctgctaaaaaacgaaaataggatgagaatggagggactgctatgccaaagggtgaaggcaatgttgttgctcagaataaaaaggctagacatgattatagtatcgttgatactattgaagcaggtatcgtgctaacagggacggagattaaatccgttcgtgcggcacgcatccaactaaaagatggctatgcccaaatcaagaatggtgaggcctggttaatcaatgttcatattgctccgtttgagcaaggtaatatttggaatcaagatccagaccgtacgagaaaattattgctcaagaagaagcaaatcaccaaacttcaaaatgaccttaagggaacagggatgaccttggttcctttgaaggtatacctaaaaaacggttttgccaaggtattgcttggtattgccaaagggaaacacgattacgataaacgtgaatctatcaaacgtcgtgaacaagaacgtgatatcaaacgtattatcaagagtgttaaccgttaaactgcctatcatctaagactactatagtcttagatgattttttgtttttggctttaagacatgatataatgagagtaccatgcggtctttagttaggatactagctatacctgactctagctgtgatactgtaaaggagattagcgatgccagtagatgctaaaacaaaatacaaggccaagaagactaagattgttttctttgacattgacgacacccttcgtgttaaaaagacaggctacatacctgaatctattaaggctgttttcaaagggcttaaagaaaaaggaattttgacggggattgccacaggacgtggctactatggtgtcgttgaggacattcgagacctagagcccgattattttgtaaccatcaatggaacttatgtgattaatcgaaaaggggaagaaatttataaccaacccctcgctcgtgaggttacagaagcttttgttgcttggtgcaaagagattggaattgcttggggctttgctggtaaggataagccagttgtctcagagcgttcagatttgattgataatgctatgaaaccagtctatggtctttgtgatgtggagccagactttcacttgtcgaatgatgtttaccatatgtggacttttgcggaaaatgatggtgaccttgaattaccagaagaactcgcatcccatgtccgtatggtaccctggcatgaacactcctctgacgtcgtagcaaatggtatctcaaaagcatctggtgtcgagcatgtcttggagcatgaaaaccttaaaccggtcaatgctatgatgtttggggatggtccaaacgatatggagatttttgactatgttggacttaaggttgccatgggtaatgccacaccagaactgaaagaaaaagcagattacgttacaggaacagtagaagaagatggcattttcaatgccttggaggaactcggattggtagaaaaagaacttcatttcccacaacttgacttggatgcagtagaaggtccagtcgcaacaattaaaacaaaccatggtgatttggtcatcaagcttttccctgaccatgcaccgttaacagttactaactttgtcaatttggccaagagtggctactatgacggtgtgattttccaccgtattatcaaggactttatgattcaaggtggtgacccaactggtactggaatgggtggtgagtcaagctttggtggtagcttccaggatgaattttctgaagagctctataacctccgtggtgcgctttctatggccaatgctggaccagatactaatggtagtcagttcttcatcgttcaaacgcctgaaattccttatgctaaaaaggaactcgaacgtggtggttggccagcaccaatcgcggaagcttatgctgaaaatggtggaacacctcacctagaccgtcgccacacagtctttggtcaattggtggatgaagactcttacaaggtgcttgatgagattgccaatgttgaggttggggctcaagataagccacttgaggatgttgtgattgaaacagttgaggtagcagactaagatgaaaattggagacaagcttaggggtgttatcacaggcatcaagccttacggtgcctttgtttcattggaaaatggtaccacaggcttgattcacatctcggagattaagacaggttatatcgacaacatctacaataccctcaaggtagaccaggaggtcttggttcaagttgttgattttgatgaatttacacaaaaggctagtctttctttgagaacccttgaggaagaaaaaaataaaatccctcatcgtcatcgtttctctgatagtcgtttgaactatggctttaaacccttggcagaagcaatgccaggatggattgaagaaggacttgactatcttagacaagagcatgaggaaaaatagtaaaagctgactctcgatgagtcagcttttttggtgttttcgatttggctacaaacaaaaagatcttcaatttaattgaagacccatgtttattaattagacatcaaaatagagcaattcttttggtgtgtgtgtgaagacttcaaagccatcttttgtcacataaccacagtcctcgatacgaacaccaactttttcaggaatgtaaatacctggttcaacagagaagcacattccttcttcgattaccaagtcatttccttccatgattgaagggaattcatgcacatccattccgataccgtgtccgaggcggtggttgaagtattcaccataaccagctttttcaataacattacgtgctgcagcatcgacttcgctggcagttacacctggtttaatcatatctagggcagcctgttgagcttctaaagtcaagtggtagatttcttttttgaaatcatcgggttttccaacagcgactgttcgcgtcatatctgaagcatagccattcaccatacagcccaagtcgaagagaagaagagcatctttttcaattttgttgcttccaggaatgccgtgtgggttggctgcattgttaccagtcaagaccatagtttcaaagctcatttcatagcccaagcgtttgatgccaaattcgatttgagcaatgatgtctgtttcagtaacgtcaagagagatattgtcgaaaccgatattaacagctttatcagcataatcaccggcaacaatcattttttgaatttcatcagctgacttgataacgcgcattttttgaatgaatggtgtcaagttttcaaagcgaccttcaaagactgtttgcaatccttggaacttagtcacattgagattgtcaaactctgcataaataatagagctgtctgtacttgctagaccagctttgattttttgccatggattttcagaatccacataaccaaagactgggaagtcgagtacagcagaggcacgtgcaacctcaagagcaggaacaaagagggcaggttcacgattttcgtagacgaagaggaacatttggcgttcatgtgggtcacaatcaaaaccagtaagataattgacagttacaggatctgaaacaatagctagccctgctttattttcattcaaaaaatgacgaatgcgatcaagtttagacatagaaaaaactcctttgtatttcttacactcattctgtcacttttatagggaaaatgcaagttgttttttggcttttcattaaatcatttactttcattgagacttttttaggctagttttgtaagcgatggatagtcttggaaacacgaaatgacaggtctttttctgaaacggctttcttcctcataaccatgaagaaggaatccctttcatttttttgtaaaaaatcagtcaaaataattgaaagtgttttcagaatctgatacaattagcatgaataagtgagcgtaaaatgagaaaggaagtgtttttatgaatactgatgaaacaattactatatacgacgttgcgcgtgaagcaggtgtttcgatggcgactgtgtctcgtgtggtaaatggaaataaaaatgtaaaagaaaacacccgaaaaaaagtgcttgaggtcattgatcgtttggattaccgtccaaatgcggttgcgcgtggcttggcgagtaagaaaactactactgtaggagttgtcatcccaaatattgctaatagttattttgctactttagcaagggggattgatgatattgcaaccatgtacaagtataatattgttcttgcatctagtgatgaaaatgacgatcacgaagttaccgtgattaactctctatttgccaaacaagtagacggtatcatcttcatgggttaccacttgacggaaaaaattcgtgcagaattttcccgtactcgtacgccgattgtcctagcaggaacagtggacctcgaacaccaattaccgagtgttaacatcgactataaagctgccgttgaggattctataacacagcttgccaagaataatgaaaaggttgcctttgtatcagggccactaattgatgatattaatggcaagctccgtctagctggttataaggctggacttgaaaagaataatttgcgctacaatgaaggactagtctttgaagctaaatatagctataaagatggctttgatctagcacaacgtgtcttgaactctggtgccactgctgcctatgttggagaagatgaattggctgcaggtctcttgaatggcctctttgctgcaggtaaatcagttccagaagacttcgaaatcatcacaagcaatgactcaccaattacaagctatacacgtccaaacctttctagtattaatcatcctctctatgatttaggggcagttagcatgcgtatgttgactaaaatcatgaataaggaagaacttgaagaaaaagatgttattcttaatcacggtattaccttacgtcagtcaacaaaataaaaaaggagttgggacataagtttgtctcaacttctcttttttagaaaaagggagaaccaatgacttttgaggatgcttattttaaaaagaaagtcctaaaacctgatagcctagaaccttttggttttacagctactgagcaaggctatgagttcagaaaaacactgatagctgaagaacttgaagctcgattgtttattgatttagaaggtaagttgacgggacaggttgtcgatagtgatcttgatgagccttatgatatcttcaggagtcctcaggctactggaacttacgttggtcaagtcagagaggcttatggagaacttctgtcacaggtagctgattcttgttatgaagatcaattattctcatctccacaagctaatcgcctggctaaatttttagctcaagaattttcagaccaagcagaccatcctttcgagaaagaaccaagctatctatcttttagagttgatggtaaatggtatgccttgttttttcctcttaagggagaaaaactagggcttgatggagaaaaggcagaattaacatatgatgtggttaacctcaaggttaatccgacgcaaatggataagctcttgaaaatggatggcgtttttcctagctaccatatgtccaagaagacctgggttagtcttgttttagatgagaccttgccagaccagactgtttttgagcttcttagtgaaagtcgttccctagtggctcccaaacatcttagaaaggcttcggagcctcattattggattatcccggtaaatttgaaatactacgatattggggatgagttttccgcaaatgaggagattctttggacacagaaagctagtatgcaaaagggagattttgtggctatctatattacggcacctaccaaggtcatccgttacgtctgtcaggttttagaggcaaatatccctaatcaaggttatcgtgaagaggagagtattaaagagttgatgcggattaagcccttatacacttttaatgacactgactttgatagtgatagactaaagagtttaggtattaaaactgttcgaggtcctcgacatatgacggaagagttagttcaggctttatccccttacctaaaagaaaaatagaaggaggacatcatgcgaattttgattgcacctgattcatttaaggaaagtttatctgcaaaagaggtcgccttagctcttaaatcaggttttgaaaatgccttacccgacgctgattttgacctcatgccaataggtgatggtggcgagggcaccttagatgctcttgctgaaaatctaaatcttgagaagaaaagtatcaagattcctcatgcctatacaagtgacggaagtgtttcttttgccagcaatggccagactgccatttttgaaatggctgcgatttgtggcttggagcatattcctaaggagaaacgaaatcctctagctctaacgacacaaggcgtaggtgaactaattgttcatttggttcaatctggcatccgagagtttattataggcgtaggtggatctgctaccaatgatggtggtattggtatggcatatggattggggtatcgtttttatgattctgagggacaggagcttgagccaataggtgctaatcttggtctcattaagaaggtatcctctaaaaataagcttgatttgtctggtgtcaccattcgtctgattactgatgtagacaaccccttgtgtggccaacatggagcaacctatatttttggtggacaaaaaggcttgtctccttcacaatttaaaaaagttgaccaagatatgtcacaattctacactgactttgctccaggagttttaaaactggctggttcaggggcgggaggaggcatggctgcaggcctggtggcctttgcaaatgcagaaattaaatcagggattgactttgtacttgattgtgttgattttgacaaacgtgtgaagtctgctgatttggttatagtaggagaaggacggatggatagccagtccttgtctggtaaggcaccggtcggggtggctaggcggacaccatcagctattcccgtcattgctatctgcggtagtctgaaggatgacttgcctgattttccggtagcaggcatttcagctgcctttcctattattggacaagtagcagacttagaccaagttttagctgctgccaaggagaatctctatcgaacaggactcaatattgggaatctcatcaagctcagtaaaacattgtgatataagaaaaagctgaccttgcgtcagcttttattttccaaatagtttagcaaaaaatccctttttttcagtaacaggttcagtttctttaggagcgaggatatcaggatagagctctgaaaataacactttatcaagattctctgcttgattactatgtacaataagaccgtatggtgaatgggccttggcctcgtccacgatagtagctgaaatgttgagtgcttgagccgttttgatataggtaaattgtatctggtcagctaattttggcgatagcttgagactaagattcgggtaaacggcttgcaagtcttttaaaatatgcggaaaatggtcaattacagttttcttttcagcattttccaatagaacagctaggactacacgttccgcataggttccaaaatactgacgaagttcatcgggattaaggcgtttttcgccactagcgcattggagtactttgttttcaagtgaagtcataggaatctcctgtaagttttctacttgtattatacaatattttgaattccttttcattcgggtcgttttctgagattttcaaaaacaattgaaaatattaaaaaatagaaaatcgctagaaaattctggttttaatttgcttaagccttgatattatggtaatatataggtgtaaaaaattttaactcataaggagagtattgtaatgtcaattattactgatgtttacgcacgcgaagtccttgactcacgcggtaacccaacacttgaagtagaagtttacactgaatctggtgcattcggtcgcggtatggttccttcaggagcttcaactggtgaacacgaagcagtagaacttcgtgatggtgacaaagctcgttacggtggtcttggtactcaaaaagcagttgataatgtaaacaacgttattgctgaacacatcatcggattcgacgtacgtgatcaacaaggtattgaccgcgcaatgatcgctcttgacggtactccaaacaaaggtaaacttggtgccaacgctattcttggtgtgtctatcgctgtagcacgcgcagctgctgactaccttgaagttccactttacagctaccttggcggattcaacactaaagttcttccaactccaatgatgaacatcatcaacggtggttctcactcagacgctccaatcgctttccaagaattcatgattgtacctgctggtgcaccaacattcaaagaagctcttcgttggggtgctgaaatcttccacgcacttaagaaaatccttaaagaacgtggacttgaaacagccgtaggtgacgaaggtggtttcgcacctcgtttcgacggaactgaagatggtgttgaaactatcatcaaagctatcgaagctgctggatatgtaccaggtaaagacgtatttatcggatttgactgtgcatcatctgaattctacgatgcagaacgtaaagtttacgactacactaaatttgaaggtgaaggcgctgctgttcgtactgctgcagaacaaatcgactaccttgaagaattggttaacaaatacccaatcatcactatcgaagatggtatggacgaaaacgactgggacggttggaaagctcttactgaacgtcttggtggtaaagttcaattggttggtgacgacttcttcgtaactaacacagcttaccttgaaaaaggtattgcagaacacgctgctaactcaatccttatcaaagttaaccaaatcggtactttgactgaaactttcgacgctatcgaaatggcgaaagaagctggatacacagcagtagtatcacaccgttcaggtgaaactgaagattcaacaatcgctgatatcgcagttgcaactaacgctggtcaaatcaagacaggttcattgtcacgtactgaccgtatcgctaaatacaaccaattgcttcgtatcgaagaccaacttggtgaagttgcagaataccgtggtttgaaatcattctacaacttgaaaaaataattctatagtcatatagaatgaaaagaggttccttagggaatctctttttgcttttctaagtgttaaaattattgattagatttatcaaattgttcctactgttagtttctctctaaatagtaacttttcgtcacttactacagttgacaaagaactcaaaaagctctataatttttacagtgattttaattgtttgagtttttaataaaatcgataattaatcaattaagactttacaatcatttgaacgagtaatacaagctatagcttaaaagagaggaaagaagaattggcaaaaattgttaaagttacaggtacggaagttataatctcgaataatgaagagtatttgaaaataaatccatctgaattgaatttcgttccaaaattaggtgatgaagtagaagtccataaagtagatgatgaaattattatcataaaagctgaagaaaaaaaagatgacaatattaatattaacattgttaatgaaaacaactcttcacaaaatcaatcacaagtcgtttatacacaagcaactactccaggtttgcattatgtaaataaatgggtttatgtttttctcgctatttttcttggtggattaggtgtacatcatttttacgcagggtatcacggaacaggtattctatttctgattttatcttttacgggtatcccaattattatcggatttatccaaggtgttattgccttattcaagacgcctgatgtgaacggtaggattgttgtttaactaaaatttcttacaaattaaacttctaagaagttcaagtctacgatctcatgacagaaaagacttcacttttttaattcagataagtaatataactctgtggtatttaatagtgatttgactagcttgtacatagaattagatgaacaagagtaatggaataactcaaatatgacttgagagtaagaatataattatgatttgtctcttgttatattatgaattgcaccccaaaagtatatatttagtttctaacttttggggtgcttttgctatagaattttaccctatgataggcactgtacctaaataggacttccaaatataaaaatcccctcaatcaataggattgaggggatttcgtcttagaatagacctttaatcttgtctagagcgccactgaccatttcgttacctgaaacaagagatttagcttggtcgaagtactcgcccaaatcatctttgttttcatcgacaaactttttagcagcttcaaaatctttcttttcgatcatttcttttacttggttaaataattccattggattcatatcggttctcctttataagttttcttacaaatcctatttaatcacgcttatagcaaactagcaagaaatatgtttgagagtaactagtgagatgagagttacaatttttcagccaagtggtattgaaacttgtttaatctaaaaaagcagtccatattggactgcctttaggggttattgttgttccgttgaagagctgcttggctctgattcacccgaacttgagctagagcttgattcggattctgcaggatgtagctccttgtaagatggggttttgaatagatcagctgttgatttattgcctttttgcttgtagaggctagttgatttatctttcagctttttgttgatctgtttcagttgatccatctgtttcgtgtaggaaattttgctagaatcaacaggtttcaaaccatttggcgtatagaaacgaaggaggtcacctgtttgaacagcatcactcatcgaaagctgagtggctactgccttacgaatggcttcgttatcctttttagtcgtttcatcagggttggtaatttcttcccctgtttgagtgttatagagtcgaccagagtagctggtgtattgaggagtaacatattgacctgaggttctaaatgcgacggtttgcttattatcaggagataggaggtcttgtcccatctggatataagagctagtgtcaacaccaagaatgtgaaggagagttggaagggcatcgacctcaccgccaaaggtgttagagatgccaccaccagtatatcctggaatgtgaatcatgtaaggaacacgttgaagcatggccttatcatagtttgaccaagtttcagggttcttaccgagaagttcggcaagattgctgcttcgtgtatcagagataccatagtggtcaccgtacatgacaataatcgagttatcgtaaagaccggtttccttaaggtaatcaaagaagtctttgattgctgagtcaagataattagctgttgcaaaatatccgttgactgtctcatcttttgtttcagcgagtgggaaaccttgttccttttcatcgcctgagagtgaagtgtatgggtagtggttagatactgtaaggtatttaacgtagaaaggttgttgcatttgttccagatatttgatggaatctgggaacatgtacttgtcatttagaccatactggaatgagttttcatcagttttttcagtgaaggctgatgagtcaaagaagtaattatacccccattgtttataggtgttattacgattccagaaggatccagtgtttccgtggaaaacagctgacgtatagccacctgtttgagctaggatagatggtgcagcataggctgtattggtaccaccatagtttaccatgtatgagcctgtgcttagtccaaagagagacgtttccatcaaggtttcagcatcagaagttttccctgatttaacttggtggaagaagtttgaaaaggctagggtttcgtttgagtggtaaatggaattgatgaatggtgtaacctcatagtcttgaccgtctactttgagcttgtaatcaatgaggaactgttggaagctttccaggtgaataacgatgacgtttcttcctttagcaattccgtaatacttaggatcaggtgctgcatagtgctctttaacgtaagcttcaacctttttcatatcctcagctgttgcagatgaacgagcctgtgaggcctgataagttaagttaccagaataggctgtgaagaagggaatccccatagcacgaacaatatagttatttgagaaaccacgtgtcaacaactcgccacggttaacttccgctaagaagaggttaactgagagaaggagtgttgagagtgcagtgacggcaaaactagctcgtttgttaaatggcttgctgtccatcttaagcttcttcctgaaaccagcatagatgaagaaaggtacatcaatcaggtagaagagatagcttggctcaagaaggttcttggcggagtctcctagtcctgctgctgaactagaacttgctaggatggtatttacagtaatgaagtctgtaaactctccaaagtaaatcacattagcaataagtaagaggttgaggatgacatagatagcaatggtaatgctataaaagaaacgtcgtttcttaaagtatagtcctaaacctagaagcattaatcctagtggaatagggttaatcagcgaaagcataacctgatatctgctttccaactcaagattaatgttgacgtaataagcgaatatggtttttagccagtaaaagaagagtaacaagaggataaatccaagtcttgatgaaactcctttccaaaaggcttcattaatttttttcaaagtaatacttcctttgattctatattatcttaatcattataccaaataagataatgactctcaaaaatttactgccattgagtgtgatattccttgacatataattgataaaatctagttacgaaacagaaataatagcatttttttggtataatagtaacatgagtatattgacggtaagtccctttgcggagaaaaaaatcaaacaaggaaaacagcttcttttagcggaagattttccaaatataactgaaaataatcagttggtttacctttatagccagtccaaagattttttaggaacgggctatttgtcaagtcaaaataaggggataggatggtttctgtcccctaaaaaacaaaaattgacagtgacttattttcaaggactttttgaaaaggcaaaggccaaacgtcaatcctattatgataatgagttgacgacagcttttcgtcttttcaaccaagatggtgacgattttggtggtctcacaattgatttatatggggattatgccctcttttcatggtacaatgcctttgtttattccttgaaggatgttattgttgaggctttccaatcggtctttcctgaggtcttgggaggctatgagaaaatccgcttcaagggtcttgatttcgaatcagaccatctttttgggcaggaggcggctgataccttcaccattttagaaaatggggtaacatatgaagttttcctcaatgatgggctaatgacggggattttccttgatcagcatgaagtgcgtgatggtttagttaatggcctagctttgggtaaatcagttttgaatatgttctcctatacggcagctttttcagttgctgcggctatgggtggagcggttgaaacgacatcggttgatttggctaagcgttcacgtgaattatcgacggctcattttgaagctaatggattcagtatggacaatcatcgcttggtcgtgatggatgtctttgattatttcaaatatgcaaagaaaaaaggcttatcttatgaccttatagtcatcgatccaccaagctttgctcgaaataagaaacgcaccttctcagcaaataaggattatcacaagttaattgcacagagtcttgatattttatcagagcatgggacaatcatcgcaagtactaatgctgctaatatgaccgtgcaacagtttaaaaaacaactgcgtaagggcttgggagatgtttcagcggacttcgttaacctgcaacaattaccagcggattttaccgtcaatcctaatgatccaacatcaaattatttgaaagtatacacaataaaggtaaataaatgaaaattgtagttccgattatgccaactagtttagaggaggcacaagagcttgaactgtctcgttttgagggggcagacattatagaatggcgtgcagattttttagataaggatagtatcttaacagttgctccagctattttcgagaaattcgcaggctttgagattgtctttaccatccgtacgacgcgtgagggtggcaaacttgagttaacggatgcggaatacatcgcactaattaaggatgtagctgctatctattcgccagattatattgattttgagtatttcacacgtaaggctgtctttgaccaaatgctcgaattttcaaacttggttttgtcctatcataactttgaggagacccctgaaaaccttatggagcttttgtctgagatgacaaacttaacgccgagagtggtaaaggtggcggttatgcctaaacatgagcaggatgttattgaccttatgaacttcacacgtggctttaaggcctttaatcctgagcaagagtttgtgaccatgtcaatgggtaaactaggtcgtttgtcacgttttgcgggagatttggtgggttcatcatggacctttgctagtcttgacaatgctagtgcaccgggacaagttggtcttgcagatatgcgtagaatcagggaggttttggatgcagattgatggatacacacgcctagcggctgttgttgccaatcctatcaagcattctatttcaccattcattcataattcggccttcgataagacacaagttaatggtgtttatgtggcctgggagattccagagtcagacctagccgagacagttgaaaatattagacgttacaacatgttcggtatcaacttgtcgatgccatataaggaagcagtcattccttttttggatgaaattagtcctgcagctcaactgattggtgccgtcaatacagttgttaatcgtgatggtcatttgtttggtcataatacggacggttttggcttctttgctagtctaaaggactttagccctagagacgctcatctgatgattttgggcgctggtggtgccgctaaagctattgtgacgcaggcagttcttgatggtgcaaaaaaagtcagtgtctacgttcgccctcagtcattggataaggcaaaagaaagttttaagtccttacttgaacaggcaacttgccacttggagtttcatgctctaaatgatcttgagtattttcaagaggaactaggccaggctgatctattagtgaatgcgacgagtgtggggatggatggcgaatccttgcccattcctacagacacaaaatttcctaagggactcttggtagctgatatcatttatcagccttttgaaacacctttcttggccttggctagaaaacagggaatcgaggctgtaaatggacttggcatgctgcttcatcaagcagcaggtgcctttaaattgtggaccggcaaggacatgccaacagacgccatttggcaggaattagaaaatatttacaatagctaggaggggacgactatgaaactagaggtaaatttaacacataacccttatgacattattattgaaaaaggagcccttaagaccgttggtcaatgggtgaagtcactttgggaaccacaaaagattgcactcatcacagacaatcatgtgggagctctatatgcagaaaaagttaagcttagcttggagcacgaaggttttgaggtagtcgtttttgatttcctggaaggtgaagcaagtaaaaaccttaaaactgttaataaggcttatgagtttttgattaagaatggcatgactcgtagtgatggtatccttgctcttggtggtggcgttgttggtgatttagcaggctttgtcgcttcgacctatatgcgtggcattcacttcgttcaggttccaactagtctaactgcccaagtggattcatctattggtggtaagacaggtgtgaacacaccatttgctaaaaatatcgtgggaacttttgctcagcctgatggtgtcttgattgatcctaatgttcttgagacacttggtaaacgtgaattgattgaaggtatgggtgaggttgtcaaatatggtttgattgacgatcttgagctttggcacttgcttgaaagcattgatggttcagttcacagtatcctagaaaactcagaaaccatcatttatcgttcatgtaatgttaagcgtaaaattgtggttgaagacgagtttgaaggtggcgtccgtatgtatctaaactttggtcatacgattgggcatgccgttgaacaaacagctggttacggtaaagtcatgcacggtgaagcggtggctatcggaatggttcagatttcacgtgttgctgaggaaaaaggtctgatgcctaagggaatcacacgtcaaattgctgagatgtgtgttaagtttggcttgccggtagactatgagccatggcgtgttgaggagctttatacagctctcacacatgacaaaaaagcccgtggtaatagcattaagacagttattgttccagagattggtaaggcagctattaatcagattcctttagttgaaatgaaagagtacttggagaaataaatgagatatttaacagcaggtgagtctcacggcccacgtttaacagcaattatcgaaggtgttccagctggtcttcccttgacggctgaagatatcaatggtgatttgaaacgccgccaaggtggttatggtcgtggtggccgtatgaaaattgagtctgataaggttgaaatcacttctggtgttcgtcatgggaaaacaacaggggctccaatcacccttcatgttatcaacaaggaccatcaaaaatggttggatatcatggctgtggaagacattgaggatcgtttgaaaaccaaacgtaaaatcactcacccacgtccaggacatgctgacttagttggtggaatgaaataccgtttcgatgatttgcgtaattctttggaacgttctagtgcgcgtgaaacaaccatgcgtgtggcagtaggtgctgtcgctaaacgtatcttggctgagcttgatattgaaattgctaaccatgtcgttgtctttggtggtaaggaaattgacgtgcctgagaatttaacagtagctcaaatcaaggaattggctcaacaatcagagatttcagttgttaaccaagaacgtgaacaagaaattaaagattacattgaccaaatcaaaaaagagggagacacaatcggtggtgtcgttgaaactgttgttggcggcgtccctgttggccttggttcttatgtccaatgggatactaaacttgatgccaagattgctcaagcagttgtatctatcaatgccttcaagggtgtagaatttggtcttggtttcaaggatggctacctcaagggctctcaagtgatggacgagattctctggaatgaagaggatggctatacacgtcgcactaacaaccttggtggttttgaaggtggtatgaccaacgggcaaccgattgtggtccgtggggttatgaaacctattccaaccctatacaagccattgatgtcagtagatatcgaaacacatgaaccatacaaggcaacagtcgagcgttcagatccaacggccttgcctgcagcgggtgtcgttatggaatccgtagttgctacagtcgtagccaatgaaatcttggacaaattctcttctgacaacatggaagaattgaaagaagcggtagcacgtcaccgtgactatgtgaaaaacttttaagcagcatcagacaatagatgggagtagtaatgagtaagaaaactatttatatcgcaggattgggcttgattggtggctccttggccttagggattaaaagggaccatcctgattatgagattcttggatataatcgctctgactattctcgaaatattgcacttgagcgtggcatcgttgaccgtgcaacaagtgatttcaaagaatttgctcccctcgcggatgttattatccttgcagtgccaattaagcaaactgtggcctacttgaaggagttggctgacttggagctcaaagataatgtcgtcatcactgacgcggggtctactaagttggatatcgttgaggcagctgaacgttacctaacaggtaaaaatgttcagtttgtggggtctcaccctatggctggttcccataaatcaggggctatcgcagctgatgtgacactttttgaaaatgcctattatattttcactccgacaagtttaacaagagagacaactatccctgaacttaaggatatcttgtcggggcttaagtcacgatttgtggagattgatgcggctgaacatgatcgtgtgaccagtcaaatcagtcatttcccacatcttttggcttctggacttatggagcaggcagctgattatgctcaggctcacgagatgaccaatcactttgcggctgggggattccgagatatgacccgtattgcagaaagtgaacctggcatgtgggcttccattctcatgaccaatgggccagctgttttggatcgtattgaagatttcaaaaaacgtttggaccatgtggctgacttgattaaagctgaagatgagaatgccatttgggagttctttgacaacggtcgtaagaaacgtaaagagatggaaattcacaaaaagggtggcgtggaaagtgccttcgatattttcgtggatgtgcctgaccgagaagacgttatccttagcattatggaattgttacgaggaacgtctttggttaaccttcgtattaatgaggaaaatcgtgaggatattcacggtatcctccaaattacttttaaaaatgaaaaagatcgcacacatgctaaaactgttattgaagccaatacggattatcatgtggtgatcgcctaggagaataaaatgacaaatatttatgatttagcaaatgagttagaacgtggcattcgtgcccttcctgagtacaaaactttggtagagaaaaaagaagcaatcgcagctgatgctgaagctagcgctcttttcaaagagtttactgatttccaagaggatttctatgctaaaatgcaagctggtacaatgccaacagcagaagaacaagcagctgttcaagaattgggtcaaaaggtagaagctaatgcacttttgaaagaatacttggctgcacaacaaggtttgtctgtttatttgaatgatattgaacgtatcatcttcaaacctttgcaagaattgaatagttaatcagagagggtgtgtcaattgacaggcccttttctgcattcaaaagagattgtccaaggaagaaactagaaatattaaggaggaaaatgatgagtcgtaagattggaattattggtatgggaaatgttggagctgcagttgctcatggagcaattgctcaaggcttggctgatagctatgtctttatagatatcaatgagaagaaggccgaggcagatgcccaggattttaaggatgctatggcaaatctacctagctatgcaaacattgttgtcaatgattatgtagcacttgaagatgctgatgtgattatttcatctcttggaaacattcagttacagcataatgctggtgaggaccgctttgctgaatttccatttactcgagaagctgtttatcaggtttctcaggagcttaaaaaattggattttaaaggcatactcttggttatctcgaatcctgtagatgctgtatcagccctctatcaggaattcacaggctggccaagagaacgtgtgattgggacagggactttactcgatacgtctagaatgaaggcggcggtaggagatgatttgtcagtcaatccaaaatcagtatccggctacaatcttggtgaacatgggaattcccaatttacagcctggagtcaggttaaggtcaaaggtcaagacattacagaattgaccagcgaagaagagcgacaaaatctgtttatgacttccatgaagggcggtcacaaggtcttttatggtaagggctatacttcttacggcattgccagtgcggctcttcgtttggtagccattatcctttcggatgctcaagaagaagtggcagtatcaagctatcaagaagcctatcaaacctatcttggctatccagttattttaggacgtcaaggggtggctgctcccgttcacttgtccttgtcggctgaggaaaatcttcttttggaggaatctgctaacttgattcgtaatcgtgttcaagaagctgttgcctttctgaaagaaaagtatggcaatactagagagtgaatattttgacaattcagtctatggttgggctttcgattatggtataatgagagtaactataaaattttcaggagtaacctatgaaactagaaaccaaggcccaaggtcttcatggcagcttgcgtatccctggtgacaagtcaatcagtcaccgttctatcatgttcggaagtcttgccaaaggtgtgacaactgttcgtgatattttacgaggtgaggatgtcctctcaactatgcaggtcttccgtgatttgggtgtgactatcgaggatgatggtgatgtggtacgcattcacggtgttggttttgatggtctcaaggctcctcaaaacaagttggacatggggaactctggaacatcgattcgtttgatttcaggtgtgcttgcaggtcaagattttgatgtggaaatgtttggagatgattccctttcaaaacgtccgatggaccgtgtgaccattccattgcgtcagatgggtgtagaggtttcaggtcaaacagaccgtgatttgccaccattgaaaatgcacggtagcaagtcccttaaacctattcattaccaattgcctgtggcctctgctcaggtaaaatctgcccttatttttgcagctcttcaagctgatggtgaatctgtcatcattgaaaaggaaaaaacacgtaatcatacggaagatatgattcagcagtttggtggtcagcttcaagtagatggcaaggaaattcgtatttctggtggccaaagctttactgctcaagaagtagtggttccaggtgacatttcttcagctgccttttggttggtagcgggactcgtggtgcctaactctaagattgtcttggaaaatgtcggcatcaacgagacacgtacgggtatcattgatgtgatcaaagatatgggtggtaagattaccctttcagatattgatcaagttgctaaatctgcgactattacggttgaaacttcagaacttaaaggaactgaaattggtggcgatatcattccacgtttgattgatgaacttccgattatcacactcttggcgacgcaagcccaaggtaagacagtgattcgtgatgctgaagaactcaaggtcaaagagaccgaccgtattcaggtggtggcagatgccttgaatgctatgggggctgatattgttccaacagaggatggtatgattatcactggtaagaccgctcttcatggagcagaggtcaatacctttggtgaccaccgtattggtatgatgacggctattgctgccctcttggttcaagatggtgaggttgacttgcaacgtgcggaagctatcaatacaagttacccaagcttctttagtgacttggaaggattgctcaatggctaaagttttattgggctttatgggagttggtaagagttccgtcgccccatacctggatggtcgtttcgtggatatggatcaggtcatcgaggagaaaatcggcatgtccattgctgatttttttgcaaaagaaggtgaggcagcctttcgtcagattgagtctgagactttggaagaacttctccaagagggagatgatgttatcatctctactggaggtggtgtcgttgtaacggagcgtaatcgtcagctcttggtcaagaatcgtaagcataacgtttggctccatgcttctttcgatgtggtctatgatcgcattcaaaaggataccaaaaatcaacgtcccctctttctcaatcattcaaaagaggattttaaggttatttacgacggtcgaatggcactctatcaagatttagcagatttggttgtcacagttgataaccgaacgccagaagaagtagcaaggtttatcaaatgtatgtaggttatttgggcccaagtgggtcgtttacacataatgcagccttaaaggcttttcctgaggcagaattggtttcattaggtaccattactgaggttattaagtcttatgaagaggggcgtgtggattacgcggtcattccggtggaaaattccattgagggctctgttcatgagagtttagactatctcttccatcaggctgatattcgtgctgtggcagagattgttcagcctatcaagcagcagttgatggcgactaaacatcatgagaaaattgagaaaatcttttcacacccacaggctattgctcaagggaaaaagtatattaaacagcattttccacatgccaagattgagacaacagcaagtacagcctttgcggctcgttttgtcgctgataatccagaccagccttatgcggcaatcgctcctcacgcagctgctaaggaatacggtcttcaaatattggctaaggatatccaggagattgaaaagaattatacccgcttttgggtgctaggaaacactgttcctgagattccgctcaatcagattgattgtaaattaacgctggccttgaccctgcctgacaatatgccaggggcactttacaaggccctatcgacctttgcctggcgaggcattgacttgaccaagattgaaagtcgtccgttgaagacggtacttggcgagtatttcttcattattgattgtgattatacaaaggaaaagttggctcagttcgctcttgaagagctaactgcagttggaattggatataaaatcttgggtgcttaccaagtctatgaaatttaaagggaaatcttatgaccaaatctaacaatgggccgtttacgcatcatgaacggttacgttacagctatcttttaaaaaatcttgctcacctgaatggacagcaggcttcagaattcaattatctacaaggaaagttagatgcctatgaagctgagcggaggtatcaagcgcaaagagaggactatcaagcagcgtggcgccagccttatgataatcgttttgactactatcaagagcgtgattatgaggctgccaatcagctaacggaggaaggactacccatctatcgagaggaagttgctaaaagtaaacctaaacgtaaaaaggttcaaagacaagcgtccccttcagcaacgtcggctccaaagttcaagtcgcaagtagccaagaagaagcggccaaagaaaaagagaaggctcaagaaggttgtcaagctagtacttagttgcttgagtcttggagttgtgttcctagtgatagccatggcttatcaattttacaagggaacagacctttctgctgcgggtaataatggtaaatcctaccagcctgccatagttgagacctttaatggtaaggataccaaggatggggtcaatatccttattttgggttctgaccagcgcgttagccaagaatctaccgatgccagaacagactccattatggtggttaatgtgggcaataaagaaggtaaggttaagatggttagctttatgcgagacaccttagtcaatatcaagggggcttcagaaaccgactattctcaggacttgaaactcaatacggccttcaatattggtgagcaaaataatcatcaaggggcagagctcatgcgtgagacgctcaaacgcaactttgatattgatatcaagtactatgccatggttgactttgaaacctttgcgacaggggttgataccctcttcccaaatggtgtggaaatcaatgcgaagtttgcgaccattgatggtaaaaaagtgtcttcggtacaagttccagatgatttgaagatggacaagaacggccatgtgccaaatcaaaccattaaagttggtaagcaagatatggatggccgcacccttctgaattatgcccgtttccgtaaggatgacgagggggactatggccgtaccaagcgccagcaacaagttatgcaggctgtcatgaagcagcttaagaatccacttagcctcttcaaaggacctgaggctttagggaaggtttactcactgacctcaaccaatatgagcatgacggacatgttggacttgggactttcaaatgccggtagtttcaaaaaaggtattaattcgcaaaccattccttcggatggtgattggattgacagctatgatttgtatggcggtcaagggatcgaaattgattttgacacttatcaggcaaaattaaaagaactaggatttagataagaaaagaagcagattcatactgaatctgcttcttttttggtatgaagagcttgtataagcgccttgtataagagttttagaaaatgatagagcaaataggtcatgataacaagaacgatgacgaactctacctcataaatcaattgggtagctagattgactaaacccagacttgtggtagctgccttaaaagcattgacactattgaccaagggaaagctaaaagctgcaaaaagtggtataaagccttttctaaccagttttacaaagagattaagagcatagaaaaagaatgcttgtgagaataaaagtagggcaagtaaaatgatagttgcaggtctttgattactcttgattgagctggtaatgagaagggccagaggtgctgctaaaatagcgagtataggccgatataggtgagggatggctatccgtttcattctccataaaacaagtggaaagagggccagagtcgctaatcccgttactcccagaataagtcccttgatgctagttggaacactagccggtactgtcaccagactgatagcagggccaacgtagaccacgaaccagcttggaaagacttggttcaaagatagggggcgcataaaacgcagactgaaaaatataatataggcaatataaagtccaaggagtccaacccaagtcacacttaagcctgtttgagctagtgggaggtggctggcaaatagaaaagcagccataaagaaactagcaaaggccgaagcaacgactgggtttcgcaaatcttctcttatttgttcaaatccaagaatcaagcgtcccagtataagtataaaacctatactagctaaacaccaaataccctgagcaatcagggtatagtggcttatttgattggataaactaaagagggcaagaaccagactagatagggccaagggaattttctggaaaaataccttcattggtccaccggcctttctagctagctgcaagaatgtgacgaagctgcaccgcactcggagatacaattggaaggaagacaccttcattccaacgacggataaagcttgattctgattctttcaaatagccacgaccaccactagcctgaagttcgaggagcaggctgttggctacgacgtcgacgatatcgatacgcaattggaaaagttcacgtggtttgtcaatgaaataatcggcatcattaagacccgcaaagagttggtcttgaatagcaagaagatttccacgtgtagcttcaaattcttcacgaagaacgctacggttactgtttagactagcttcaacctcatcaagagaacgtttggccaaaccaaaggcaagaccaaattggaaaccaaggaagttcggacgtgttttggcaatatagtccgtaccttcttttgaaaggatccaattaggatctaacttaacgtgatcgaaagtaagagaggcagtgttagcaccttgaagggaaacaaattccaaatcttcagaacggctgaggccttcagcttcagatggaatggtgataatccaaggttggctaccatctttaaagtcagcagcaaagagagcagcgaatttatcagaacgtaggttagttacccaaggcaaacggccatcgagatagtagtcatcaccttcttgactgatggtaacattcaattcttcaatatcagacaagaatttgaccgcatttgacaagccagttccaccagcacgctcaccggtatacaattctttcaaccatgtttcacgagggtaagcattgtcactcgcaaggatatactcgatgaaagtacggtgcccccaagaaataaaggaagctgtcaaagagtgttgtgccaattcatcaagtacatcaacgacttgagtaggaccaccacctaggccatcaaactcagcaggtacgccgattttaaagacgtcgttttcagcaattttttcaagaagttggtccgcaatgggtccagactcttggtcaatatggtcagcgttggtgtccaaccaagtaaggaattcttttgaaaaatgtgacataggcttaggtcctcctctagtttatcctttggttttgaattaagcgaattcttgaagttcagggttaatcggtgtttgtgcgagattgttagcgtagttacacaagctagcaaggctgacacccaagataacgtcaagggcattttgagcagtgtaaccagcttccaagaagtcattgtaggcttcgtcaccaacagcacctttggtattgatcacggcaatagtgaatttagcaagggtatcaagttttggatcgtcttcgattggtgtacggttacgaagggcttccaagagttgtggtgtcatttggatttgcttgattgaaaaggctgtgtgacctgccacacagaaagcacatccgttagtaacagcagctgtaatttgaacaacctcacgttcagttggtgtcaatgaattgcgacggttgatttcaccgacagtacggtaagtttcaagcgcagttggcgcattagcaaggagaccaatcaaatttggaatgaatcccccattggcatctttgactgtttgaaggacgtctttgacttcttctggtgcagtttcgattgtatgaatggtaatatctggcatgattattctcctttagatagaaacgacatctagccaagttgctgagtcgtttaattttttgtcatggacctatgatagcactgtatgacttttctgaaaaatctatattatttatggccagccataaatttaatttatatgtgctataatggagggtagtaaaaggctttagaagatatgtttaagccctataaagagtaaagaaagttgaattatgttaaataaaaacgatattgtagaagttgaaattgtcgatttgacacatgaaggagcaggcgttgccaaggtggatggctttgtctttttcgtggataatgccctcccaggtgaagtcatcaagatgcgcgtgcttaagctcaagaaaaatatcggctttggaaaggttgaggagtatgtgaccctttcaccaaaccgcaatcaggacattgatgcaacctatctccgttcagggattgctgattttggacatatgacctacgaggagcagctcaagttcaagcgtaaacaagttgtggacaacctctataagacagcaggcatctcagacgtagaggtcactgaaacattggggatggagacgccttacgcctaccgtaacaaggctcaggtacctgttcgccgtgttaaaggtcagcttgaaacaggtttctaccgcaagaattcgcacgacttgattccaattgaagatttccttatccaagacaaggaaattgataaactcattgtctttgtccgtgaccttctccgtcgctatgacctcaaaccatacgacgagaaggagcagacaggtttgattcgtcacttggtggttcgtcgtggccattattcaggtcagttgatgttggtctttgtaacgactagaccaaaaattttccgtattgatcaaatcattgctaaaattacagaagccttcccaaatgtcgtttctatcatccaaaacatcaacgataagaacactaacgccatctttggtaaggagttccgtaccctttttggtcaagataccattacagatagtatgttgggcaatgactatgagatttctgcccagtcattctatcaggttaacaccgagatggctgaaaaactctatcaaacagccattgacttctcagacctaaacagcgacagtattgttattgatgcctattcaggtatcgggacaatcggtttgtcattcgccaaacaggtcaaggaagtctatggcgttgaagtcattgaaacagccgtcgaagatgctaagaaaaatgcagaacgcaacggcattactaacgccaactatgtggctgactcagctgaaaatgccatggccaagtggagcaaggatggcatcagaccagatgttatcattgtggatccaccacgcaagggcttgacagaaagcttcatcaaagccagtgttgccatgcaacctgaaaagattacctatgtctcatgtaacccagcaacaatggcgcgtgatatcaaactctaccaagaattgggatatgaattgaagaaagtacaaccggttgatttatttccgcaaacgcaccacgtggagtgtgtagctttgctcgtaaaagcctagaacctttgaacgaaagggataatgaaaagccttgattgcaaggctttttgctttatggtggggaagtattagagtaagtaatttttggagtgagtggaagtgatagttaggaattctcaaattctatttccatttacactgtgggtacgtttttatttccattgacaaggagtttgagggaatagaaacgtacccacctatatgaaaaaatcacgaaaggtttgatctatggaaatcagtagaaattaggtgatacaataacacgttataaaaaccttgaaatcagtatgtttcaaggttttaagtactcttacggatagcattgggaacatctaactttcttgaggagtaaagtttgtttctcaatatagtaatcgttaaattgtgtcgaagcgttatatgatatgataattccaaatagtcctttgggctttttatggcattgtgatattctctaagaacacgagattgcttcaataatttacaaagttatggggatttctcatagcttttttactttcttccttgacaattgagcgagtgttcaactataatgataatagttgagtggttgttcaattgaatcatcgattattgaggtatgagatgtaatttttcttctctatcaccagtaatgcaagctttattagctggcttattcaactggttttgtacccttatcggtgctagtttggtcttttttgtcaaaaccattcatcaaaaattcatggatatgatgatgggcttggcagcgggcattatgacggcagtggcagtctggcctttgcttgtcccttctttggactatagccagtcaatagctacgaacagattttactggttgacgacggctgttggttctattgtcgggggcttatttatccgctttattaattatttggttcccgacctacatttgaatcatcagatgagtgataaggaagggattttgaatcccaaaagacccttatcaaagaccatgctgctttatctggcggtagtgtttcataatataccagagggcttagcagttggtgtggcatttgctagtgtggcaaatctcgcaactagactttcctttacgtgaatgagtgcccttggattggccttgggaattggcatccaaaatattcgagaaggctctgccttgtccttgccactacgggtagaagggcgaagtaggaaatcagctttctactatggcgccatgtcagcgattgttgagtcgattgcagctgttttaggggcctatgctgttatgtctatgacccagctactaccttatgctctcttatttgcggcgggagccatgatttatgttgcagtggaagaacttgtgccaggtgctcaagagcacaagaataccgatattgcgacaggtggggttatggccggatttctaatcatgatgttacttgatacaactttagtataggaggaatagaaaatatgtcacagtgtttaacagcttgtaatccagatttaattcaaggggtccatgagacggagtttgataccgttacattgctaaatatgtccaatttttttaaggcgatttctgacccaactcgtttgcggattttacaagcagtacggcaaaatccaatttgtgtcggagacttagcgattgcgttacagatgaccaagtctgctatttctcaccaactacgctatctgcgggactgccaattggtcaagggggagaaaaaaggaaggatgacctattatgaacttgcggacgatcatgtcgcagcagtcttgtctttgacactgaaacatttgaaagaggaaaaacatgaagaaagagtatgaacttcgaggaattgactgtggcaattgtgctgctaagattgaacgtgctgtcaatcaattggagcaggtagaatctgccactgtcaatctgatagctcaaaagctgattttggaaacaaaaagcgaagatgggatagataaggaaattattgacttggtggatgctattgaacctggaatcgaagttatcagtgagaaaaaggaagaggcacttccagaaaaacgagattgggcgaaagagctgctacttgctgttatgattctatttgccttcggctttttcctgccagaggagtatttctggattcgtctggtctattatctgaccctatatatcattatcggccataaggttcttatcaagatggttcaaaatattcaacgtggtaatctttttgatgaaaactttttgatgagtatcgcgaccttaggagcctttctcttgggagaatttccagaggcagtagccgtcatgcttttttatcagattggggagtatttccaagataaggccacctctcaatctcgtcagtccattgcacgattgatggatattcggtcggataaggcttggagactagaggggggagaaaccgttcaagtagaccctgaaacagtaagggttgcggaccatattttagttaagcctggggagaaggtgcccctagatggtctggtcagagaaggtcgttctattctggatacgtcagccttgacaggagaatcactgcctagggaaattggcgttggtgaggacattacaagtggtgtgatcaatttgactagtccattggtaattgaagtgagtaagactttttcgcaatcaacggtcaacaaaattttggaattagttgaaaatgcaagcaataaaaaagcggagacggaacggatgatcacacgtttttcgcgtgtgtatacaccagtggttgtcggaatcgcttttctgcttgcaagcctgcctcccttgcttggtttaggggagtggtcgacttggctttatcgggcacttacctttttagtcatttcttgcccttgtgctcttgcggtttcggtaccaatgagtttctttggcgggctagggggagcatctaaattaggtgtcttagtgaaaggtgggaattatttagaggctcttgccaagttggatacggtcgtatttgataagacggggacaattacaaaaggtatctttgcggtggataccgttgtcaacgcagaaggtgtcgaggatgatattctgtacctcgctgcccatctggaaagctattccaatcatccaatcgcaaactctattcgaacagcctatggacaggaagtggacgagaatagggtgagtcagattaccgagctaccagggcagggcatgtccggtagggtagatggcagacagctctatcttgggaatgctagattaatggaagttcaagggattgcttatccagctattgacagcacaggaacagttctctatttggcagaggacagtcattttctaggctatttccttatcacagaccaagtgaaggagacgagcatcgaggccttgaaggatttacaggcagtcggaattaaaaagacggttctcctttcaggcgatcgtcaggcagtggttgatgaatttgcacagcaatttgcctttaatgatgcatttggagattgcttgcctcaggataaggtgagtacatttgaggaaattctgactcagtctcagcaggctgttgcctttgttggagatggggtgaatgatgcaccggttcttgctagggcagatgttggtattgctatgggagggctaggttcggacgcagccattgaatcagcagatgttgtactgatggatgatgaccttggaaaacttcctcaagtcattcgactggcaaaaaagacagtcagaatagcccaacaaaacatgaccttggctattgtagttaaactaattttcttggttctaagtggattgggaatttctaatatgtgggaggccatctttgcagatgttggtgtaacgctactagcagtatggaatgcattgagggtcttgaggatagatacctccactttgtcaaagtaagtgaactgatgttagtatgattttatggacacgttttggtagaatagtatctaaccaaaggagatgtccaaatgagccaaaaatataccaaagagttcaaggaaactagtgttcaattacatgaagcaggacacgtggagtgtgtagctttgcttctacgagctgattaaacaaggatttagcaagtgaaaatcctacagtaaggagtttaaacatgaaattccatgaatttggtgataggaattcgccttctatcttactgatacatggcggtggcagttcttggtggaattatcttcgtcaagcacgtattttatcagaagattaccgtgttattctacccactttgaatggccacggtgaagagtatcaactcgattatgtttctacggaagattctgctttggagatcctaaactatatcaaagcaaactgtggtgggaagctgtttgcgatcggtggcgtttcacttggcggtcaaattgccatggagcttttgtccttagacagcgagatagctgagaaggccatcatagatggaagtctctgtattcctcaaccaaggttagctaaaatcagcatttttctagtagctctatttggtaaattgatgttcagtaaattctcttgcaaacttcaattaagcatgatggacaaactctatcctaaactggcttatccagaggaaataaaagcatattatttagagggtctgccaaggacacctatcaaaacattggtgaccatttacaaaacctatatggggcgttacaagctgaaggagacgatttctgctagcaaggcccaggttctgtatatctatggtgaaaaagaattaaactgtgtgaaagcatcggcgaaattatttcagcagctacatcccaacactatcctgtatgaagcaaaggggtataaccatggctatctatcagcttacctgcctcaagagtggattgatttggtggtaccatttttggagaataacgattgattatactttattaatttagaaagcagagtttcatggaagtcaaaaaatatagtccgctcaattcattaaaaaagatagcagataacctctggattgtagatggggaagaagtactgatgaatttcaaactcttcaaagtgcctttttcaactagaatgacagttatccgtctgcagaatggtggtctttgggtgcattcgccgattaagcctagtgataatttactttttgaaatcaagcaattaggtgaggtaaaacaccttattgcacccaatgtcttacattatagttatataaatgagtggcacgaactatttccggaagcagaagtatggctagctagtggtgttcaaaagcgtgccagaaaatcgggaatgaatttatattatggtcatgaactagagaaagccaattggaacgaggaaatttgttttacaacatttgagggaagtttttacgtgaaagaggttgtttttttccatactgaaagttcaactctaattttaacggatcttattgaaaacatagaaacagaaaatttatcgatttttgaaaagctactgttaaaaataggtgataatcactatccaaatggtaaaacaccaagagatttaagaatgacctttttatttggtaaaaaacaagcattgaagagttatcataaaataaagaaatgggaacctaagaatattattatttctcatggaccgtgtatcattggacaaacaaaagagatgttaaaccaagcgttcttttggctagagaaataggaatttactataaagaaattaataaaatatatctaatataattgactaaaattacttggagttgttaaattaagatgtggaatctacttaaattgttgattctaagaggtatcagttgacacgagagaaagaatatagattaactaacggtatctcttaattagatttagtgaaagaagaatccatttttcacttgaatcccttctctttcgtatggtagaatgtatatacaaattgtatgtacaaaggagaggtagaaatggcaaacacgaaagcagtgaattttcgagcagatgagatgttttaccagaaaacaaaagaggtacttgctgatgaaaaaatttctgtgtcagatgtcctaaatgcagcacttcgaaaaattgctaacgggactgtggatccaagagaatttgtttcaagtgatttgcagaacacgcagtatcaagtggcctttgaggatttgaagaaggagattttagttgggcaccaggaaattgctcaagggaaagtcacttctgtagccgatgtgagaaaggaatttggtcttgactaagttgaaacgctatcaggtctttcttgcagatcaggctaagcaggacttgcgtggcattcacgactatattcttgtgaatttttatagccagcaagctgcagatggcaaagttgatttgctattaagtgctcttgagaccctagaactgtttccagaagcctgtcctctggtatcaagccggggctatggtgagatgacgaatgatgtgaaaccctatcgttatatgccaatagagaactatctcgcattttattatattgagaagcatacagtgtatgttgctcgtatactcagtgcaaagcaggattgggtcaagattttttataagtaggatgaggaccccatgttaaaatcgaataagctgattatttttttagtttccctaccttttctgatggtcattattttctattctcttagtgagcatcctggatatagtgatgatgggaattttgtcagaaatcatgaggctgctattaagagtgaaatcatcgcacacttagctcaggaaaggcaagacataaaatctgtgacgctcttaccaaatactgctagaggagagtatgataatggtggtgatgtgagcggacattaccatatctattttacagcctacgtcaacaataaccgcgagcgaacgataagcgtagaactattcttcccagatgccagcattcccccatttaccttgtttcctcccaacccttataaagacaaaggcaaaaagatgtccaattggttgattgggaatattgaagtatcggaagaaagctctaaatagaaataagaacaattcatgatgaatagaatagtagacgatcagatcactcttattccttattataggaatgatgagatctcccttctttggtatcaagatagtgaggtttgcaaacaggtggataatactgatcagatttacgatgtaacaaaacttcataaaatgtatgattacctatcttcacatggttcttgctattatatccaatatgaaggagtgttagttggagatgtgacactcctagataactcggaactttctatagttatcagcaaagagtatcagaatttacatatcggaagacgatgtgtttctgaaatgatacatctggcgaaagaacaaaataaggtaaaggtctctgcacaaatatatccttttaatactcaaagtcaaagaatgtttttggctttgggatttcagaaagtagatgaagagcggtatgaatataagttgatatagaacagttgtatatttccatatatattaagaatgtaatctgctgtttataaaataatgttcatgaaaaaagagataaagggtacctactgatccatggacaagagttttgttcagaaatctaaaaatgaagagaacaccaacagatgattttttgttggtgttctctttatgtgattttacaattattcttttttgtttacaacaagttaaacagacagtttgtaggaggaattcaaactcaaaattttgtacaagttaatgaaagcttttccccattataatctgtccacgccattatcagttttttgagttatctcatcacgaataaaagaaagattaaagttgtacatgagtaaaactctaatgcttagccctagctactttctaaatgaaaatagaataagcttttactaaatcatttattcatttgccacacacaaataacaccccacaagttataacttgtggggcattttcttatattagttcttcacttacaaaataacgtctgttttttcaactttatagagggcaattcccatgattagggtcaagacaagaagaattaaaacagcaggggtccaagagttaaagagttgtttgcttgaaccgaacaaaactggaccaagggccgcaaagatatagcctccggtttgggctaaacctgatagttgggctgttttttcaggcgtgctagccttcattgaaaaggaaaccatcatgtaagggaataggacactagcagaacttccgattaagaggttaagtaccaaccaatacacaaagctgtctgtattgactagaagcatggcaactccgatgagtcctgctaggacggtagccactagcatcaaatggcggttacgatcagaaagtttagtgattaggctaggaatgatcatagagaatggaatactcgtcagtgtgaaaacggaagctagaattccggcattggcctcgccgacaccggcttgagtggccatggttggaagccaagtgatagtggtgtagaagaagagtgactgtaatccaccgaaaatcatgatggcccaaactttgccgctcttataccaactgcctgaattttcgttagtagaagtatcttgttctaaataatgattgtgacggacattggggagccaaaccacaagagccaaggcacagactgctgtcaatacccagaccaaaccttgccatgaggttgccttagtgattggaacggctactgatgaagccacggctgtggacaagccccatggctgtaatgtaaagtgtggttaagaatcctaactgatttggctcattagcctgaattaggcttgggagaaggacgttgataaaggcaattccagctccgactaaaagcgttcccacataaagaagagggagattaagggtacgcaaagcagaaccaagtgtcatcacaattaaaacaccgaggaagagtctttctataccaaagcgtttggcccagctagccgcaaaaggtgagaatatcgcaaaggtcaagagagggagacttgtcaagagaccgagagaactgacctcaacgcctagaccagaagcaatgtctgataagaccgtagacaaggttgtgaacggggcccgcaaaacgatccctagaagaaggattccagggattagaaaatgtgaatgtttctgtttcataaactatctccatgtttaataagggtattttaatttttaagaatatgacattaatgcgtcactaccatcttaccataaatgaagggggtgatgaaagcgattacgttggattgtcaagaaagaatttttagttttataatcctattctgctgattatcaaatagcataatctgatttttaaaagaccgaacatgtagtccagcctcttttcaatctcgtcttaaatttcataccccataaggagtccgccttcttcagcataaaagctacagagtccagaagtaggaaggacttcgatgcttgcttgggcaaatttttcacgaaccaattcagagaattgctcgataaatttttcattgttgcggtgggcaatcgtaatgtggcctccagcataaccagccttgaggagttcatcaaaggcagctttgatagctttcttttggccacgagctttttgaagcaactctagggtaccagtcttactagcttcaccgaccatacggatattgaggagtccaacaacggtgccaaccagtttacttagacgaccattcttcaccaaattatcaactttggctaaaacaaagagcaacttagtcttggcttgataagctgtgatgccatcaacgacttggtcaaaatcaaggccttcagcgactaagtgattgagtttacgaacgataaggtcgacctcgccaccagctgacaggctatcaatcacgtgaatcttagtatcaggatgctcttccagataaattttcttagcgatttcagcactattgtagctaccagaaagggttccagtaatcgtcacgacgacgatattgttcgctccttcaaaggatttcatataatcatcaggactcggacaggcagacttagaagcagtcgtagtcgcatacatttcctccatcatttgatcaatattgagttgggcatcatccctgtaaatggtctcgcccacttggatagtcaaaggaacactgacaaactccgtatctggtgccagattgtccaaagaacggtagtcacagcctgaatccgcaataattttccatttcataggtttatacctcatatctgcataatgtacattgacaagtgttttgtcttcttttacaattttatcatgaagtgcattgctatcatagtagatctcatcaggtgtgacagatagaaagtgaatgttatggcagaaagaaaaatctcagagaaatccttggaaaatctcaaacgatttaaccaagaaaacaaagcaattacacgagaatccattgaaatttctctcctgcaattgttggagaaaaaagactttaaaaagattaccatatcggaactggttgagcgtgcgggtgtatctcgtgctgccttttatcgcaattatggttctaaggaagagattttgaaatctatttttgagtctagcattgcaaagattactaagtccttggacggctataatctcaagacggatctttaccaagtctgggtttatctccttaaggaagtcaaaaaagaagccaaaatcatcagtcttgccattgattataattttgagcaggtattgaccaaggccgtttatgattttttggaaaaacgaaatggtagctcatcaaatggtgccggtagttacctcaattccttttggagctcagctattgtctcagtgatttccaaatgggtcaaggatggcatgaagaccccagctgaaaagattgccaaacttggtctcccgctttttccacaaaagaagaagtagtagccactgagaggtggtttttaagtaaactgcacctttccattactagttcaaatgaatagatagaactgtgcacagattatacaaaggacaagaacgatgatcgaagaacgaattcttgctgctaagcagtatgttaaaaccttatttgctgatcgagcggatggccatgatgtggcgcatacccttcgcgtctataccaatgctatgaaaatcgcacaagcagaaggtctatgtgatctggagatagtgggcttgtcagctcttcttcacgatgctgatgattataaattgtttcaaacagagaataatgcgaatgctcgcatgtttctagaagagattggtgctcctaaaaagcaaatcgaccagatttgtcgggttatcaatgctgtttctttcagcaaaaatcgcggtaaacatccagaatcgttagaaggcaagattgtccaggatgcagaccgcctggatgcgataggagctgtaggaattgcgcgaactttttcctatggtggccacaaagggagaccccttactgataccgtccaacatttccacgataagttgctcctcttaaaagatgaaatgaacacggagactgccaaacaaatggcagaaagtcgccatcaatttttaatcacctttctaaaagaactagagaaggaattggactgagtgaaatattgaaattaacttttataaaagacttatttgaaaggaagatatgctaaatcaactaataaagaaacctattttaagttgttcaatgatatttgttatctgctcagtagcaaggctaatcgaatacttctatatgaggacggatgagaccttcttatctgagaattttctacataagctttttggaattcttctactgtggggagtcctttcaatttgtaaattaagatggaaagatattggtttcagttctgacggaatagtgagtggtatagggaaggggctactctttggcttagtgtgttccgtctttgcatatacagttgagtgcattgttctcttgtttcttcatggcaatgttcacttatcgttttacgccaggccagtggtttttccttaacaaacgaaaaagtatctcaagcaggaatcttacttattctctcaagtgtgttgtttaacctgataaacgtatggatggaagaaggagtttttcgtggccttttcacaaaaattcttgaagggctttcttaccgcaagagtctattctttatagccttcctatttggaatatggcatttggtaatgccgtttagagattttcttcaaggagaatcttccctcacaaatcttattgttatgggaattggttatgtcatcctagcgggaatgatgagcattaaatggtccttactctacaaaatgacaggttccttatggtttgggttaggagatcattttttcaacaatcttgcttcgaatctagttcatgtggtttcaaattctgaagcagatagtttgcagattgtgagaatccttctatggcaattgctatcatttgctatagtgttatggggttatcaaaagaaaaactgaaagtcaatccccttgctactacaactaattggaggttcagtatgccaatatatgaattttgtgcagagaatgtgacttacttagaaaaagcttttcaagccggtgctcaacgcgtggagttgtgtgataatctggctgttggaggcacgacaccttcttatggtgtcataaaggcggctgttgagttggccaaggattatcaggctaaggtgattgtgatgattcgtccacgagggggcgactttgtctatagccagcaggaattagctatcatgctagaagatatcaagtgtgcgcgtgagttgggtgttgacggctttgcactaggtgccctgacttcagaaaaccaactcgatacagaagctctaaagaccttgctagatgctggtcgaggcttagaggtcaccatgcatatggcctttgaccaaatccctaaagcagctcagcctagtgctattcagtggcttaaggaccacggtgtgacgcgtcttctcacccgtgctggaactcctgagactgctctagactcacgcttgcaagcctatacagaattggttcagctagcagacggtcagttagatattttagcaggaggtggtatctccgtggctaatcgtgaccaatttcttgccatacctggtcttgagcaagttcatggaacacgtgtcgtcttttagatttacaatggaaccagcttcttggctcggtttcttttgatttttgtgtaatgcgaggcactttgcttttctagtcattctttggtaagctattactatagcattaaaaaaattgggggatgtatgttagataatttgttaaaaaagaaccctgtcttgggtgtcattatttatccgttattagggctaggagctatttggcttggtcactattactcacagagcctttcgctattggaaaaaacgggtggtcagatcaaggttaatacttttgtttacattgcctatcaattaggtgggaccaaactcgtcatggggttctttattcttttagcgcttttctttttctatctgggctatacttactttaaaaaacttggcaatactcagaaataagaaccaagtttatacactaactgcggctacttgcttgcagttttttcttttctacaagtcaactagaatccctaatttatgctaaaatggaattattacgcttcaaaaaggagatgagatgaaagcagaagaatggttaacctattttataaagatttatggacgtcgcccaaagatgacagaggtcgacgaggcgatacaaaatggtagtctcttggccaatcgagcagaagtagagagcttattgttagcatctaagaagagcttttggcaaaccttaagtcagtatgttgtgactcataaggtcgcagcgtcagttcttgcagtttcttgtatgacgcttcttggtggtggtgccatttttgcttggcattctcatcattcacaagcgcaacagacgtcatcccttgcggtctcttcgtcaagcagtcagactggtcaaacgtcttcctcagacaagtctaaacaatcgagttccagagcttctgactcgtcttcaaactctagttctcaaagtcagaatgcctcatcagaagccaaaacgcctgccatggatgtagatgctattcgaaatggtgatttttcaagcatcgaaggtgactgggtttctgacggtggtcatgttgtgaccattaccaagtcagggctcacaaagtctgaagagacaggaagtactgatggcaagactgtcgttaaagatttcaacggtcagcctatgttttattttgcggacaatggtccagggcatggggtcaatccttttgtgcctgtgccagccaatcaagcagcaccgtctccggacaattctgtcaaggacacagatcgtttggttcaaattccagagtctgcggggccaggggtggtttacacgtcttattacagagtgaaaagtaagagccagtccagccagactagcccaaccaatacgacagccctttggaatagtgacaaggctgccaagctcgcaagttacatggtggagtttgggcacaagatgaatcaagaaagttatagaaggctaacacctaacggaagtgacgatttctttggtgccatgtcttttgctaaaaataaccgcattattgtaggtgaaaagactgaacaaaatgctccaatgaccaaccaacaaaaggtagacgttgccttttctgacgatggtacagggacagccgactatatcattgtagacagctacgggtattcaggttctgccatgattctctaccatttcaccatccataaaggtcaaccggtggtcctagtttccatgcaaaatcaggggaatactgagaacatgtattacatgtaccctaccaataataaggacatccaagaagcctttgccaatattgtgaatgacaagtgatggtttgagaggtttgaaagaaaaattttacatcttaaaaatacaatataagtgaacaaaagattttctatgttccaaatctgtttacttactatttaaattatataaaagggccagcctaaagtttagactggcttttcctattataaaataacttagttattcatcttttcgcttttctgtcatcagagctaatggagtacatatcaatacaatggttgctcctacaataaatacattatcaaatgccctgcttaactgctcatttttttctttaacaatgactttaagagcagatgctaattcatccttttgagctaataatttaatagctgtaccaactttagcttgtcctccagagatagttttcaaactagttgataactgtgggacacttgaactaacagtttcaactccattgattaataactgatttgcatcataaatctttctataattactcccctttttaggttctggaagattatctgttttttgagcagctattttgattgcctcaaccatattactttgtttggttgaaatactattacttttcttagtcgtgtcgaaagtttttgaaatttccttcttagcaactttttttacgtctgttgataaaacccatttttcaatttggttatacgctgtttccttaatttgtgttttagcaatattgacattactatttaaaatggtaacgagaagagccataccaatggcctgtccaatatatctagaagcattaacgatacctgacccaattccagccttattaattggtaaatattttactgatgatgttaaggacattgccataaatcctagtcctaaaccaataattacattacaacaaacaatgaggctttgtgaggtattatactgaataagactaagcataaataatccacctgctgtaataaccaaaccggtactaatgagcaatcttgcactaattttttggtacatcttagttgctaacagcatacctactacgatagctaaagatgtgggaataataagatatgctgaatgcaaagcagaatagttgcgaacattttgcaagaaatagtttaagatcaatgaaggtacgataatcgcaaatccaaaaatcatataaataatacttgaagatgtaaatgtactttccttgaataaatttaagtcaatgataggtgattttactcttctttcggttaaaaaaaagaaaaataggcctacaacactaataataaaactagctatgatggtttgtgatgcccaaccatactcgtgaccttctaataaaccaaatataagtccacctaaagtacaagtaagaaaaataatacctagccagtcaatattctttaaaatttttaaatcatatgattcttttgtccctactaggatcatcaagaatgcaaagatagcgattggaacattaataccaaaaatccaatgatatgttgtccaatggacaattaaaccaccaattaccggtccccccgctgcagctaaggcactgaaggtccccataatagcagtaatacggctggtattctcttttccaagtagttcaattcccatggggagaacaattggagttaatatggcacctccaattccttggaagaaccgaaaaataattaagagtaataaagaatcagccaccatacatgcgaatgagaagatgccaaatatgactacaccaattagcataaccaattttctaccgtagatatcagcgagttttgaaacagtaataataaatacagacattgctaaaacatagattgttgctacccaacttgtatcagtcaatcctgtatgtaagtcttccataatatttggtagggcgatattaacaatcgtggcatctaaagctcccataaagagtgctaaaactagacctataaatcctagaatttttcttgattttgtcattaaattctattcccttcattaattattttgttaaatgattaatgatgcatcaattatcttcgtgaacataaaacagtcttttttaacttttataattcacataaaaagaatataataatacccatatattgaccatgacaacatcaaacaatatgtttaattaaggaaaaaatgacaaagaaaagaaagactaatagcgttactaacctcaagtctgctttgatagaccttctacttgaaatggagtactcaaaaataaccattggaaatataactcagagagcaaatgttagtaggggaacattttatcaacattttcttgataaggatgatttagcatactctatcggaacagagacgatgcaaagattttgggagattttagctcaaggaaatttagataaagaggacatgcttttaaaggctctactattaataaaaaatgactataaacattttaaagcaatttcaaaagcacctcacgttcaatttaaagataaggttcaacaacttatttgtgatcttataaataacaactcagctattagagaaaagatcaagaaaaagacgaagatttcagatgaaattgtgataaaagccttctctacatcttttgaaaccattatctcatcctggattgataatgatttatcggaaagtcccgaaaaagttgtagataatatcattaaaattgaacagctattttggaaataataaaaaatatagaaaaaatgataaaaatccatagtcttcaaacggtgtgagcctatactgagactttacgccgtgataaaaacgcctgaagaattggtatttcaggcgttcggaatttttgagattttaggctcaaaaattagccatggaacttcgaagaagttcgctggcgtccgctatcacctaaggaaagtctcaagtaaaagcctttatcttcaatctaaagccttggcaacaaggctttttcttgtggaaaagtattctgagaataagtagatgtcaaaatctggtataatgaagccaaggaggcgcctatgaaaactttgaaaaaacagacgctaattcttttatctatctctagcctgctacttgtcggtttagcagtttttgcacatctccacaaaaaagaggaacaagcaaattactccaatcttaatagtaaggctagtattagtgaggtgcgagccatactctcgaaacatttgaacgaggagagtgtggataactttatcaatctcgtcactgattacaatgacaccgtgggttctgtaggtctttctgggagttttgcgccatttaccaaaacagactatgatgtggaaaaaatcagtagcctgtggacagccaagtatggtgactttatcggtaccaactgtcgtatcaacacctacacgctactgaaaggcaaaatcaagattcctcaagtcaaaagtgatactgagctccttttccaagacaaggacgccattgacaagggcaagctctttaatgccaaggaccaggcaaactttgacattcttttttcaagggtcaagactgaagctacccaagatgtcaaggttcacgccaagcatatggaggattactacaaacagttcacctttgatgacaaggcacgcatgctgtcggttgttgtccacgataatctggatggtgattccctttttgtcggtcacgtcggagtcttggtgcctacgacggatggctacttatttgttgaaaagttgacctttgaagagccctaccaagccattaaatttgccagcaaaaaagattgctataagtatctcacaaccaagtacaaggactataccggaccaggcctagccaaaccctttatcatggataatgacaaatgggtggatatggactagcttaacgtgaagcggaagttttaatagggaagaaaaaggaatgaagaaatgaaaagaaaacaagccttgtcgctttatctggcggggacccttggacaaattttattagttagtctcattgtcttgattttaagagcaggagaagttagggttgattatgggactccaattggcctctttacccttatgttaggtggcttgtcatcagccatttggggagcaattattagcatccgctatcatcactccagttttaaacagcttgtcagagattttttccaagtcaaacaagctcctcttaactatctcttagtcctcatttttctatgtttggattttttaccatatgtctttagtggggaaatgattattccaacttggtatctccccataattttatttgtaaaagccctcgtctttggtggtatagaagaaattggttggcgttattttttccagcctactttgcaagaaaagttgacctatctagtgtccacgctttgtacctttgtagcttggtcactgtggcatatcctctatttttacattgacggttctctggcaaggattcatttgctgttatttttgctaggcttattaagcaattgtttcatcttatccgctatttatacaaagaccagaagcctttggctttgtgtgatgacacatgcgttgatcaatgctttatcgcaactgtcatcagttgagaacatttggttatcccttgtgattaaggtgctgataatccttcttgccatgagaattgctagtagcagtgtggagaaagttaaatgataaaccgacttttttctcactttgcttcaattatttataaatcttaagagtagttcaagactactctttttttctatgtaatactcaaatgaccttgcccttctttttgaggcatgttatactagaaaatgtattgtcaaaattttctgacattacaggtggaaaggaggtgctaatgcctttaaaaaaaacaaaacaccttgttttttccagctacctaagcctgctctgtttgcttctatttttagtagtaacgtcagtttttgttgcagtgtccttaggagcggtcactatagatataggtgatacctatggtgtcatcctcagaaaattggggtttcctattgccagtcaaagcatagccaaaccacttgaagctattatctggaatatgcgagttccgagggttctcctagggctagtagtcggtgcaggcctttctatgtcagggagtgtcatgcagtcaaccgttaataatccgattgccgaaccctacattttaggcatctcggcaggagcaacttttggagcaaccttggccatcattttaggccttaaagctgtggtaggcttgggtgcctttgtgggggctatcctagcgacggttcttgtcctcattattgcctctatgcagggaagagtgaccacatctggcttgattttatctggaacggttgttaatgccctctttattgcctttgccaattttataatctctattggagcgacagcagatagtgtcatgaccattaagttttggaccatgggttcattgacaggaacatcttggtcagatttgatgcttccagcagtagtggttggtttggcctttctctttttctcaactcagtatcgtgtcttcaatgccatgatgatgggagatgaagcagctttgactttagggattccacttaaactctattggtatctttatatcgctatcgttgcgatcataacggccgtcttggttgctagttgtggtattattggctttgtgggcttgattacccctcatatcgctagaagtatagtcgggactaactatcgtaagctttttccagtggcaactctcttaggttccttgtttgtggtttgggcagacgtcttggctagaatcctcgtcaaaaatgcagagttacctatcggtatctttacagccttggttggcgcacctttctttatttatattgtgactaaaaatcgtaggaaggtggtttagacttatggatgtaaagtgtaaggatattcattattcgattggagagaaaaaaatcctaaacggtgtctctctagaggttgaaggtgggcaattccagaccatacttggaccaaatgggagtgggaaatcaaccttgctaaaaaccatttatcgccagttgaaaccagatagcggtcatattttacttgatgggaaaagcctagatcaggtaagcctaaaggaaactgcaaaagaaatggctgttgtgacacagtttaacacccttcaatttgattgcacggtggaagaaattgtcatgcttggccgaacgccccatctttcctttctacaaaaagaatcggagcgggaccacttgctcgtccaggatgccctagacaaggttggcatgtctgaaaagaagacacgctattattcgtccttatcaggtggagaaaaacaaagagttatcctagcgcgtgctttggctcaggaacccaaactccttttattggatgagcctaccaatcatttggacattaagtatcagttggagatgttgactttggtcaaggcattgggtattaatgtccttgcagttcttcatgatattcaattggcctgtcgcttttcagattatatatacctattgaaaggaggtgagattgttgcccaaggcgtcccaagggatgccgtcaccccccaatccttgcaggcggtttatgatgttcacagtcgtattacatggacggatgaccagcaggcaatgattcagtatttataagcctaggaaaggaaggccttatgaacaagaaaacgtttcgtatcgcattaatcgctgcagctgtccttacattgacagcatgcagttctacatataaaaacagcacatcatcgtcatcaacagcaaaagaaacggtaaaaaagaccaactcagaaacccagtatcctttgaccgtcaaaacttatgacgataaaggaactgagttagatcaagtcttcaaaaaggcaccagaaaaggttattacaaataacctttcatcaactgaaatcttgattgagcttggtttaaaagacaagattgtcggtatgcttaaccctgacaatgaagtaaccgataaatataaggaagacattgcctcaatcccgcatatcggtgataagaagaccatctctcaagaagccatcttggcttacggacctgatgcccttattggtcgtaacatgatgttctcagacaaatcaatgggaaccatcagcacgtggaacagcaacgacattcccgtctatacgcaaaaagcttctgtttcaacaaccaaacaagatttgaataatattatcgaagatgttaaaaatattggtgacattttcaacgttcaagacaaggcagacaagtatgcaggacaactccaaaagcgtatcgacgccgttaaaaagaaaaacaagtcttctgacaaagacttgaagaaggctctgatcatgtgtgcctacaacgatgagacctttggaacttacaaatctgcccttcaagaaagtatgcttaatcagcttggctataccaatgttgcgacaggaacatcagatttgactctggaaaatctcgtgtctatggaaccagaattgattatctatgtaactagtgaccgtaataaggccatggacaaggatgctacagacaagatggaaaagaacgctgttcttgaaaatgtaccagccgttaaaaacaagaaaatcatgactatttcttatgatgagcttatggattacggtccatctgtgattgattctcttgagaaggttaatgactttgttaataaataaagactttgtctgccatggcattcgagtgacgattgcccttcctgagtcttatgatgctactaagacttatccagctgtttttctgaacgatggacaactggattatctgggaaaactagcggattctgttatcctggtaggccttgagcccaagaatcgcttggatgattttacaccttggtatgctcaggctttgagacctggaagtcctgattttggtggcaagctagccagctatcatgaccaactatttggccatattttaaatagcatccaagaggagtttagactggatgacagtcgcatggcttacggaggctactcgctgggtggtttggctgctatccacagtctttatagcagtgataagatgccttttatcttttccatttgtggatccttttggtattcagattttgtagattactgccaatcccatcagcttcttaataagtcttgctcggtctatttacgtaacggtttgaccgaagggtctaatcataagaatagactggccaaggctcctagctttgccaaagaagtacatgaatgcatcaaaaaacagtgcttatccacttattcagcacttgacccctacggtcatcatgataatctccaagaaagatatgatgctttttcggactggttgattgaagagtggaaactctgaaatgctgctattggtgattgagtagaaaagagagaagaaaagtagtgaagaaaattccgacgatggaatctcttcactactttttgttatgaccatcacagttgatgcttccgaaaagtttttagacatgaatcaaaaaacgccttaactccgtatattaaaagtaattgacttacctttgacttatatcctaacttcaaaaaggacaagactattattgttgttgatgcagtaacttatataatttaaaacttttttgttggagaagtagaagggaaaaaactatactttggtgcctgagaatacttcgatatggttccctagtatttttatatctactggaagattatccgatttgtctccatcaacatctgactctaactcaacctctgaagaaatcctaatattacgcgctttgatatattcgatattatcgttacctactagatccccttttaacaaatctgggatagtcgataatttagaaatgatggatgcatcttttaaaatcaagatatttccatatccatctgtattttcatcaaatagttttttgtctgcatagtaattagatagaagaactaagacctgactagcttcaccttcataattgccattttcgctttcaatacgaacattaaatacatcgtcttccacaacggacttcatcgtattgattgcatatgcaaagataccgtactttgttttatcttcaatatcaacgttatgaatagcttctggtaaagatccaacacttaaaatatagccaaaataattttgattagcttttccaacatcaatggttttagtaaaattgaaatcaagttcttcaatcgcttgatcaatattttggttgatttctaatagcttagtgattaaattaccagttccaccaggaataatcccaagttttggaatgtgatttttttcagcaatccccgaaataacctcatttacagtaccgtctccaccaaaaacaattactgcatcatatttttctttagaggctttttcagcaaattgagttgcatctttggctttttgcgtaatcttagtttcaacataatcaaaatactctttagccttattctccaagctctctttataatctaatgctgtttctcctccagaagttggattaataattatcattacttttttcattgatattttctcctatggactactagtgacgatacttttcaacggtttcttatgcttatcaaattaatatctcacattacttgttgttatttggggattctttttacttatccttttctatttgttgaagatcatcatcgtttttatattgaatgatgtagtcgactatttctttttcagttaatctatcatttgttatttgtgaaacctgaatcgagatatttttcaaaccatattcattttgtttgttaacgatactttgtaactcagcttctgaaagatatttacctgaaatggttagctttagtgtattattttctttactatatttctttttcaaaatagtatggttttcaaattgatcagatagataattattgatagactcattgattagcgtatctctaactaaggtagttgcagaagctaaacttggaataataagaacaagcgagactagaattaatatttttcgcattttagaggctttacgattatgtttaacataaggattattaaccatcatcacattagtgccaatatatgtagcaatcataataaaactgcagttaatggagaacaaatatgacgcccctatcatatactcaagatttcctgtggcaatagaataccccacggtacaaacgggtggcataagagcagttgcaatggcgacaccaggaacaatgttattagcttctttctttcgtgctccaataatgccggctaatccaccgacgaatgctattacaacgtcccaaattgtgggcgaagttctagcaataatttccgtacttgcgtaagaaatgggcgaaagtaaaaaataaagtgtagaggctaaaaggcttactgcaacttgaataaaaagaactttaaacgattttttgagaagttttgtatctaatattgctaacgcaaaacctactccaaggataggtgtcatcaatggagaaatcaacattgcccctatgattgttggaatagaattcatattcaaaccaatagatgcaatcaatatcgcacacaataaagtggttaagtcactttttgataaatctaaatcctcatagattttgtccctaaattctattagagaataaagtttaccatccttcaaaactttttccataacagtactccctctttgttagtatagtcactttttaagaagttactcaatactgtttgacctcttctgaaaggaaagaatatcttgagggaacaactttttaagctcactctttgacgacgtatctaaatcattggccattattattgtaacttctttacgtgggcgtgttttatattctactttcaatttgtaatcaattcattactccttattaatgttaaactcctactgaaaataccacagtgtctggtatattatttatacttctttattagatggttactttttaaagaaaaatcatgtaagggtttccataattcaattatacattttatttatgttttagtcactctaacttcttaggactattttcttttgtatctaaaacctgattaatcacatggatgcaccagtttaatcaatctttttattcctaaatttttccatttaggaaatgctcttataattgtatagctaggtgtaatttattcaaagcttctcgtgtacacaaaaaaattatgagctaagcgaaattacaaacttacgcaaacggttgcaaaaaccaccgatagtttccatactttctttgtaagcgcaaacattttcattgacttatcaatttgattaacttatactgttattaacaggtatatactaacattaatcttatgattgttaagattaatataaaaaatgttttagctaaaatgtaactctttagatggtttgattttccaaacaatctaactttcctctatgtagaaagggggagacattatgctttgggctattattgtcggaggctttataggttttattgctggtggaatcactaaaaagggaggttccatgggaataattgccaatatctttgcaggtttaattggttcatctgttggacagtcactcttcggttcttggggacctagactagctggaatggccttagttccatcaattttaggggcagttattgttgttgcagtagtatcatttttcttaggaaaaaaagaataattttcaatatttcgacaggaagactccaatcaactagcaaacttagtgccgataaattaaaaaagtggtaaacatggactagctaatggtttatcagcaaataaagataacgttagtgagggtgttcaagctgtttatgactcgacttcaacacaaaagctataatttaacttatcttgttatacttaaaaatttgaatgtattgtttaagagcgttcatatttaaaaatctttatgtccaaaggaggataaaattatgtcagtagaagaaaaacttaaccaagctaaaggcgctattaaagaaggtttcggaaaagtaactggtgataaaaaaacagaaaaagagggtgctgctgaaaaagcagtctcaaaagtgaaagaagttgccgaagatgccaaagatgctgttgaaggagctatcgaaggtgtgaaaaatatgattaaaaaggacgataaataattaaatagtcaattgatttttcacataaaagctacaaaagttactctacaaaaaaatagagttgtcatattctactcctaattactcacttataagattactttcaaaataactacaaatcgatattcttataatattattcagttgaaaaatcaactttctttagattaatttaaattcctttttaaatccatatatattctttctaatagtaaaagcactctaatttctatagttttatccaagctatagacgctagagtgttttttataacattttgaagaattatttaatgattgggggaggtttgtatttttctagtttttatacaaatcagcaaaatataagcgctaacatcatcccgaatagggaatggcaaacgtttgcattacttgtgaatattttcactaccaaagcatcacattttcagtgaattacttgattttcataagtattagttttataatcaaagtatagaaaacgctttcaaaaacatctccgagtttttgtcctacttgaagtggttcggctaacagccgacttccattctagaaaggagtattgttttgagtcaatgtgatattctcattataggggcaggtcctggtggttatgttgctgctgaagaagctgcccgtttaggtaaaaaggtaactgtcattgagaaaaactccataggtggcacttgtttgaacgttggctgtatcccatccaaagcctatcttgaacatgctcattggttattagctgctaaagaagcctctcagtatggagtaacagttttaaatgataatcttgattttcaaaaacttgttgctcgcaaagatcaagtcgtagcaacactacagtctggtattcaatcaagttttaaacaattagggatcacctatattgaaggtgaggcagcttatatttctgataaaaccttccaagttaatggtgaaagagtctcaggtaagtctgttattttggcgacggggagtcatccatttattcctcctattgctggtattaacgatgttgactacttgacaacagatagctttttcaacttaaaggaacttcctcaacgtttggttatcattggtgggggtattatttccgttgagttagcttttgccatggctccacttggtgtggatgtgacaatgatagaggttgcaccaacaattttagcaactgaagatgacgaagcacgttccattattagagaaaagatggaacaacttggaattactattctggagggagttagcatagatagggttaaagaaaatgctgtaattttagcagatggcaagtcctactcttatgataacttacttgtagcaacagggcgtaagccaaatattgagttagcccaaatgatgggcttggagctgaccgaaaaaggctttattaaggtagatagttattacgagtcatctcaatcaggtgtttatgcgattggggatttgattcctggatatatgttagctcatgttgctagtagcgagggaatcaaagctgttcgagccatttgtcgtcaggctgaggaaccggttgataattcaagtgttccacggtctctctttacaacgccagagattgcttcctttggcttgtcagaagaggaggcggtacaacaaggatatgatatatcagttggtcaacttccttatgtttataatggtcgagccattgcgtctaattcagcaaaaggttttgttaaaattgtctccgaaaaacgctatcacctactattaggtgccgttatcgttggtccacacgcaactgatattctacaatccttgattgtcttgaaagatgctgaaggaacacttgatcagcttgataagacaatttttgcacatccaacaatttctgagttggttcaggaagttgcaagactgattttaaggtcctaaggtcgatggataggtttagcacagccattctcatttttcaatctatatatctgtcaataatatttgttttttataaagctctctatagaaggaggaaacaatatgacacattatcaagaattgccacaagccctaatgaaagaaaaacatcagggacaaaccttaaccaaggaagaagttaaggttcaaactgcccatgatcttggtgtggaaaatgtttcaaaagaagaggctaaatccatgtataagactatgtgggatattcgaaattttgaagaaaatgcacgacatttcttttcaatcggtcaaattccaggatttgttcacctttactcaggtgaggaagctattgcgactggggtatgtgctaacttgactgataaagactacattactagcacacatcgaggacatggacactgtgtggctaaaggtggagaccttaaaaaaatgatggctgaaatctttggtaagtctactgggcttggtaaaggtaaaggtggctctatgcatatcgctgacttggataaaggaatccttggtgctaatggtatggtaggcggaggctttggtcttgcgactggggctgctatgcgcaacaaatatctaaagactgatgatgttgctgtatgtttctttggtgatggtgctgccaatgaaggtaattttcatgagtgcttaaacatggcctctatttggaatctacctgtggtatttgtaaatgaaaacaacctttttgcagaatcaacaccacaatggtattcatcaggttctccaacaattgctgaacgtgcacaagcttacaatatgcctggcgttcgcgttaatggtaaggacttatttgctgtttatcaagtggctaaagaggccattgaacgtgcgcgtcgtggagatggtccaacgttaattgaagctattacttatcgtaaccatggccatttcgaaggagatgagcaaaaatacaaagcaccagatggaatcgaaaaagaatgggcagatgtggatgccttggaagtatttcgtgacctggtaactgaaaagggtatccttagccaagatgaattggatgagattgttgcccaatcacaaaaagatgttgaagatgcaatccactttgctcaagagagcccaattccaaaagaagaagctctctacgaagacgtatttgcagactgattgaggaggattcataatgactagagaaacattatttatgaaagccatcaatgaagggctcgatcaagccatggaaagagacgagcgagttgttctcctaggggaggatatctcaggtggtgttaatgttgaacacttagaaaataataacgaggatgcctggggcggtgtcatggggattacacgaggactgatgccgaaatatggcagggaacgtgttattgatactccgatttctgagcacggctatttatcagcttcggtggggatggcgcttacgggactaagacctgtaccagagttgatgtttaatgattttattggattctgttttgatgccctattaggacaggcttctaagatgcgttacatgtttggcggtaaagctaaagttccgatggttgttcgtactatgcacggggcaggtgcctcagctgctgcgcaacactctggatcctattacggtttatttggatcgatccctggtattaaggtggtcgttcctgctaccccttatgatgctaaaggtttactactggcgtcaattgaggatgataatgttgttattttttctgaagacaagactttatatggattaaaaggggaagtgccagaagaatactatactgtaccaattggtaaggctgccgttcgtagagaaggtaaggatttaacaattgtgacaattggtaagatgttgtatgtagcttatgaggtcgcagaccgcttggcaaaagacaacatttctgtagaagtgattgatcttcgtacagttgctccatgggatgaagaaacagtattaaattccgtgaagaaaactggtcgtttaattattgtggatgaggccaacccacataacaatactgcaactgacattgcatctgtagtttcagataaagcttttgattatcttgatggaccagtaaaatgtgtttgtgcaccaaatactcctgttccatttgcgacaaacttagaacaagcctatatccctgatgcggataaggttttgaaagtagctgatgaattgattcaggacttgaaaggataggagggcacttatggcaacagaaattttaatgcccaagctcggcctaaccatgactgaaggactcattcaaaagtggttggtccaagttggtgatacagtaacaagtggtcagcctttattggaaattagttctgaaaaattgactagtgaagtcgaatcccctgcttctggggttgttctagacattgtgcatggtgaaggtgttacagttaaatgtaaggaagtcgttggatggattggtcaggaaggagaggatgtaggaacccaagaggctcctgcacaagaggaagctccaactgaagtcgctaaagattcaacaccgtctagtcctaaatctactacagcacctatagctcgtactggtggggaacgcattttcattacaccggtggctcgtaagatggctgctgagaaaggctatgatatctcccttattaaagggacaggtggaaatggtcgtattacaagacgtgatgtagaagcttaccaaccaagtcttgttgttgataaggtcgttgaacctctaccacaagatatgacctcaggtcaatacggtgagggactccaaggcatgcgtaagattattgccgaacgtatgatgaacagtcttcattcttctgctcaagtgacactccatcgtaaggctgatttgactgagcttttgaaattccgtaaagaacttaaggccaaggtccatactccacttgaaaatggtgaactaggtatcacaactctattaactaaagcagtaaccaaagctttgagagattttccagctttgaatgcttggtatggcggcggcattcatcagattcacgaacgcattcatattggtatggcaacagctttggatgatggtttggttgtccctgtgattcgagacgcagaccgtatgactttagcagatcttggtcaaagcattaagactctggctaatcaagctcgaaaaggtacacttccatctgacctatatagtggttctactttctcaattacgaacctaggggggccaggtgtagaatacttcacaccaatccttaactccccagaggtggcaattcttggagtaggagcaactcaacaagctttggcatttaatgaggagggagaggttgttcaaaaagactatcttccattgagtctgagcttcgaccatcaaatcatcgatggccttccagcagctgaatttttagcacaagttatatcttatctggaagacccgtatctccttattttctagtggatttaaattttgcaaggttaagattatcaactaatagacatattataagttaaaatataaagttttttgctaaccttgtctagctcaatagctagcgtaaagcttacacaaagagaagacaaaattagtcttctcttttcgtgttgctaagggggagagcttttcttaagtcaagtgggaatttgtctatcaatttcctaatgtcttttaataacaatatacaaaacccatttgtgattttgtctttcttcaatctttgaaaagccaatacttgttaatagctgactcaattcagaacttgttccataatctgtcatatgatacttaattttttctttttcggaagcaataatcagagtggaaggattggacatgactcgatagatttcctgaaagctttgttttaaatctttccagaaaatatgggtctgaatggcaaagacaagatcaaaataatgattttggtaggggaggttttcgacattgccaaccatcagctggacactatcattttctattgactttaaaagcatccgtttagcagtttgataagactccttggaaatatcaatgccatgaatgtcaagatttttatctaaagcaagtaggtttttgatagttctaccaccgccataaccgacttctaaaatacgactattgttagggatagtgatttgttttattgcccaaaggctgagttccttaaagtaggacgaccagatgttggtaatcactcggccaacaagaccactcggatttctagattggtttataagatattgaatgagcatgttccctcccatttttgaaaataaagtttgaaatatagatggtttaaattcaaactttattatagagaaagctagtaagaatagcaaggaaaaatgaaatatatacacatatatttcaaacttatgctacaattggtaataacagaggtatttacatgaatcaatatcaaaagacgactgagaaaaagaagcaagcgattattcaagcagctttgcgtctattcaaagaaaaaggttttaaggaaacgagtataaaatctattgcagaggcagcagaagtatctcctgtttctatctacaattatttcgggagcaaagataatttggtggctctctgtgttaatgacttgtttgaagaaataacccaacaagccgaggacattttaaatagcaatctagattttaaaacaaaattagaccaggctttagacctatgtcaggagaaaatgagtcagcaaatctcggactattttcaagataaaatggtggaagattctgttttctcaactctcttaacgaaagcaatcactgcaaaaaaacgtgacatctatcgtgcttatattcatctcggaaaagcagaggaccttattgctgaagacctatcgacagagcttatcttaactgtcatggatgctcttaatggtatgggaaatcaattagcccatagtgacaatttagagacagaggttgagcaaattcatcagatctttttgtacggtattttaggaaaaaagaaatcatgattttcctaattctattattgttcacagctaacaacatcccatctcttgtatattctcatgcatgggtgtaaaatttactatataaagataaagaggagcaagttatggaattaaaagattttacagaaaaagaacaggagcaaatcgagaaaggtttgagtacggctgagatttctgataaagaagcggctaagaagttgctcgctctcgtaccacaagaatggattaaacgcattcctttctttgtcagagggcatgcgacgactaagacagttgagcgtgtagctaagcaataccctgaactctatgccgtggcgaaacgtcaaggagaccttcctgaaaaagagagagaagagttacgtaagattatgacagacatctttgaagaaaagatgaacaaacacaagattaaataagatttttaaagacaatgtgtttatttctacaattacgaatcaaccttccataaaaaagagatactgtcaattttaccatcccgttacggagaaaaaatgagcaaatttatttcaaaacaatcagtcgctatctggtatgtactgtctgccctatttactacatatatagtagggcaagttatcctatggtgtttcccagacaggactagtctgggtgcctcactactgtttatcctaatgaactgtgttcccctgattatggcggctgtcttttctcttgtgttgagtgaagtcaaatccttgggtgaattcttcaaaaaggtctttcttcaaaaagaaagtcccctgtcctggattctagctctcttcattccagtcatctactatggaatctcattctttctcaggaatgttagctttactgggaacaccttcttggccttcttactatattttccctggacctttttatatggggggctggaagaagtaggttggcgttggtttttacaagaacatctttactttagcaagcactttataactaaaatgatggttctttccattgtctggttcctctggcatatccctatctatcaactcccttggattacagcaggttcctccaactatctcattttttacctgatgattttaggaaatacttttctatttggagctctcaaagagtattcgaaaggagctgctccttgtatccttgcccatatgctgatcgatagtctggctgtccttatgctagttcagagttctcttactcagattatccttctggttattttcgaaatcctactagcctcttggctggtggcggtacgaaaatcatagaattagagttgaacctcccactgaatttcggtgggagcttttctttcctatctgttgatataatgacacagtttcatttttaggaggtgattcgtttggccaaggatacattccatcatcaaaaggctgaaaaagagagagaagagctccgtaaaatcatgacagacatctttgaagaaaagatgaacaaacacaagattaaataatgttgtatcaaaagaggtataagtctacaaacttatacctctttcttatctttacttcctatttgatttggatagactaatggcaaccatagtcgcacacaggaaaaatgctgagagtaaaccttttgtagtgggagtcataaaaggtttatcaaagacataatagttatagacagaaaatcccagtccaataagagttacaataatcgacacaacaaatagcgtcacccataatcttctttgagtcatcgtaaacctcctgtttgtattcgttttctttctgcctatagtataacataaaaaaccttagctaaattccagagagtggattggctaaggtttttcattttatttcgtcaagacaaccgtatcgtttggatcatggtcatcatcttcaatagtcagctgattaccgtcgagtttgtagaatttggtatcatcaccaatcgttagactttgattgtcagggttaactgttacagacttgctttccttctcgccatctgcttcgtcctcttcccaagttccagtatttccagagatggttagggtaatgcgatcattttcatcagttcctttataggtgccatctagcccttcagtctgtttagaaacttcagaactttgtgaagatgaaaccttacttgaactttgttgggtgctagcagagctttcaggtgtttgagctttctggtttgagcaggctgctaaaagaccaagaactgccatagaggcaagagaaagtgtgagttttttggacaatgtcataggctttgtctcctttctttgataccttaagtatagcaaacgcttacaaacaaaccaagcaaaatcctttttctgaaaatagttaaaaatcactcttcaaattctcaaaggcataatctattatccctatttaaactatgctatactgataaaaagcaatcaaggaaggttcctaatgacaactaccaatccacgtcgcaagtgcgagcgactttgggcagccaataagtatctggtgctcagccattcaaacaagatttacttagaaatccgtaactatctcaagaatgatgaggttagtttggatcaggttcaggcctacattgatcaagccctggaccttcctgaaaatcctggtcaggtcgtcaacgccttccaacatatctgggggtattttaagaaaaaggcgactgccagcgagaaggaaatgtttatggcccaactggatagctatgcagcaggtcaaattcctcagcatggtttagtggcttccgtcaaagagctcctcatcaagtacccaaatcgctatctggaggagtcaaccttaattaatgggggttcaaaatgagactgtggcatcaagccttgattgcaaaactacctcgtcagcaattattagggcagcaccgagaatgttgcgcccttcgtggtaagggatggcaacgcaaacatgctacggttaactatgtttttgattattcaccgtaccgcttgtttaaataccatgagctcattatgcaagaaatgacggaacgtggctatcgtgtcagcccagagtggttggacaaggagtatcgaggcaagcagatgccagcctacgataagcttgaagtggagaagctaccagtcatcatttacccagagcatgatactgcctatttacaggaatgtctggacaatctcaagcaaaaaggaatcatcatctaaaggaggaaaacgatgcatttatttaagtggttagcacctaaaaagaaagcagcagaaggccttgtcatgcgtatttcgacagctgatcaggtagactatgcgacgatgacaaacccaagtgacagtgatatctgggatgccttggtgcaacttccagtatcctacgatagtctctatctcacttatagcgaaaaagggtcaatgagttttatctttgttgaatccgaggatgacaagtatcgcttggaacacgacacacctgagctaggattagaattgacaaatgtagcacgtgtatcccaacaagttgccagagacatccttattctcttttctaaagagcacacagtgattttggatgaccattggaaacaagagaaagtaaggtaatcctatggcctacctcaccccagaaaccagacgaaaacgacgaaaagccttttgcttaatcattgaaatcatttgtctggttcattttgcaatcattgtcccgcgagaccggatttttactcctgaaaaatgggctcaaacaccagctcctatgcgacacaaactcatgtggagctttcaccgtcagtatcagcttgagggcatgacgagaaaagaagttgagaaactcttgggcaaggggagtaatcttcaaggaagtgttgagtacaagctgaaggacgattggattggtggttggcgtgtttaccatattgactataagcaaaaccgtgtgattcgtgccaaagaaacctggcaagactggtgaaaatgggctttttcttcccctaaaagtagtataatcaaggtgtaaaggtaatcgttttcaaaagaacgaagctgtcttttgattagaaatggaggacaaacttatgaccctatttatgtctaaactgatgagcggtattatggaactgctcatagtctctgtcattccttttatcacttggttaatttggagcaggaaaaaggtcggtttctttgactggattgggttgaagaaagttcaaacccagcagaagaggcgattactactgaccattttgggtattagtctactttttcttcttttttcgattgtagtctttagttggtttgactctagcaaaacggccacagcagatttttctggaaagggaattgtagctcttcctgctattctagcctacgctatcttagggactgccttgccagaagaaatcttctttagaggttttctattaaaaaggatgcaaggaaaactaggatttctaggagcaaatctggttcagtctctcttatttgggctcatccatgggtatatgtttatccaactaatcggcgacctaaaagctatggctatttttgcctttattagtctcatagcttacgttttgggtactatcaatgagaagaaagcaaacggctccattcttccaagtgtctttatccacgccttggccaatacgattgtaggccttctctttgccttttcccttatttagataaatatagaagaaagttatcatggatgaattaaaagatatcaaacttaaaaactatcagtacctaaatgaggttgctatcaagggggaaacgcttttcacgggctcctctcttatggagctttttcccatttgtgaaatcgctaggagtagaggtatcgacgatatcatctacaatcggggcatcagtggtttgaatacggatgaatttctccagcatctccatcccctgcttttggatctgcaaccgagtaaggttttcatcaatctcggtaccaatgacatgaccgaggagccttatggagatcagtggttccaacatatgacggcaaatatcagccaaattctggagcaaacactagctattttgccccatactaagatttacctgatggctttttacccagccaatctacatctgccttggcagacaccggcatctatccagtggatgaaactgcggactcctgaaaatcttgaccgctgtaaccaggctcttgaggaaatcgccaaaacctatggctgccactttattaattgtaatgctgagctggtcaatgataggaaagagcagaaggctgagcacacctatgacggcgtccacctttataccaatgcttacttaaaagtttttgaagttctggagccatatctcctgcattaagaaaatatgagagaatttccagttcttactcgcttttttcccttgattacagtacaatagacgtcaaaagtgaaaaattgaaatgaggtatccctatgtggaaatggtttaaacgactcattgtcctcgtcattgtgctcttttttgcagtggcggctctacttattccggacaagatcgacagtcaggaccaattaaaaaatgtatcaacacaaacatcccttgctgatttagcccaggctggtattggtggggcgtccctttcatcaggcggggtttcaactgagattaatcttgacagtaatcagtttcgtcaaatcctaaaagcaagcatggctgattctaatgacgagaccttgcaaaacagtagcgtagagttgaatgattcctatctaacagctaaggttcccgtatctcttggacctatcgaatcaacatttagccttgattttacggtcagcactaacaaggaagtcatcctactagatttggcaggtgcccacctgggtcgccttccagttccaaaatcactggttctgccttacctcaagaagagcattgcccagtcgagcagtggtgttcgcatggttaacgaccaaattcagctcaagcttccagaaatcggctatgaaattgagcaagcctctgtgaccaatagcaagatgaaggttaaacttaacattccgatttccttgccaacaagttggtaatccataataaatctttcaaaacaagtccatagtctggacttgttttttgataccttcacttctaaactaagaaagttaaaaaattcttgaaataatagctttaaatccctcaatcccctagaaaatgagcttttcctatgctatcataagattgtaaaattgataagcgtctgacactcattgaaaaagagttatttcactgagttaaagagttttaggatagtagttaggaggaaaaaatggacgctttaaaatatatcacacccaaattttttaccaccatcaggaattattctaagggccagtttctcaaggacttaattgcaggagttatcgtggctatcattgccctgcccttgtcgattgcccttgccattgcctctggtgttaatcccgaacaaggtctttacacagcagttgttgcaggcttttttatttcttttttgggaggtagtcgggttcagattggtggacccaccgcagcattcgttgttattatctatggcatcattgctcagtatggtatggctggtttgacccttgccacgctcatggcgggactcatgcttattatcatggggctcctgcgttttggtgacctgatcaagttcattcccaaaaccatcacacttggttttaccttggggatagctgttgggattgtggctggacagattaaggattttttaggccttgagatgaagtccgtgccagctgagttcttagaaaaacttctagcttatgggaagcatctttcaagtattagctgggcgaccctagccattggtatcttggccctagttattcaaatcttttggccacgcctttctcagaaaattccggggtctttggttgcaattattgtgactacagccatcgtagcttctggtcatctgccagtcaaaaccattggtaatctttacaccatcaaagcaggacttccaagtttcacagttcctaacctatcattttctttgattcgtcaaatgatgtcgccagccttcaccattgccatactagcagccatcgaatccctactttcttgcgttgtttcagacgggatgattggtggtaatcatcgctctaatgctgaattgattggccaaggtgtggggaatatcatgtcagccctctttggcgggattcctgcaacgggtgccatcgcccgtaccgcagccaatgtcaaaaatggaggacggacaccagtagcggggatggttcatgcccttaccttgcttctgattttactctttctcatgccttatgcctcattgattcctatgacctgtttggcctcaatcctaatgattgtcggttataacatgagcggttggcgtactgtcgttcgtatgattcaacgtgcccctaagagtgacgtagcagtccttatcgtaacctttatcttaaccgttttctttgacctagtggttgccatcgaatttggtatggttctggcagccttcctcttcctcaaacgcatgtcagacgtggctcaaattcgtcagtgggtggacaaggaaaatctggacgatcctatattatctgaggacagcgacttgaaacaagtccctaaaaatgcagtcgtatatgaaatcttcggtgccctcttctttggtgcagccaataatttcttgaatgttatcaatgacgacggtaagaatgtccttatcctacgcatgcgcaacgttccagccatggatatatcaggcctggatgcccttgaggaaacgcttgctatctgccaaaaacgtggaatgaccttgcttctttctcacgttaacgcccaaccctaccgagttctcgaaaaatcaggcttcatccagactatcggtccagataatatctgcgagtcgacggaccaagcccttgaaaaagcagtagccctagcaaaagaaggctagacaaatccattttgcacaagaagaaaaagccagttcaactgaacttggctttttaaaatacgcgataaacatagggattgtcaggttgaccgacctctttaacctcagtcaaattgaggatagggaggctctgtttaagattttgataataatccacagtgatggtaccagtgacttttacccaggtattatccttgaaggtttggtcacttcctctcgtcgccagtccgtaaacacctgaatcggcgatacagtggataataccgaaacggaagatgaactgataacccttggtctgtgggtcattgtaaacaaagccggtataggtgaccttcttgcccacaaaatcgttaggatagaggtagatgagctccataacttccatgtaattttccgtggtaatctggatggtctcacgtcccttgtacttggctagctccttggtcatctccttctcataagcagaggaggtgaagtaggagctggtgtctggcttcaaatactggatagtcgttccctcttggtcggcctggttaggatcgctccctgccgccagtggaaaatgatagcccttagctgatacggtattggcatccaaggttactgttggcaccaagagccccgtaaggactggaaaggccaagagaacgatgctggctaccttggctactcgacctgacaaatgcgagtgaaccttcatctgcttcatccaaacaatgagttgaaccacagcaaggataaaggaaagcaccatggaaatgtaagccaggtaggagtagtggatattaatgtactggttgagcttgccagaaacttgcaagtacatgaccagctcaaaatacccagataagatgagaaaacgtaacattaaatcacccccaataccagacagtaaatgattgtcaccagacttgcggttcctacgaagagaccaacaaagcgtgtcttaaactggtgtttcatcatgattaggttcttgatatcaaccataggaccgatgatgagaaaggccactgttggtgccactccaaaactagagagcaaggaagccccgataaaggcatctgcctcagaacaaagcgagagtataaaggccaggagcatcatgatgaggatggctgtcaccgaattatgaccgatggtcgtgagaatacgggtcggtaggtaggtctgcatacctgcggccaccaggctcccgaaaatcaggtaacgcccagtgtcgaaaaattcatctaccgcatgaaccaaggcctgaaaaattttcttactagctgacaaaccactatagtcgtgcacatgactgaccttacgattgtccttaagaatctggtcgtccaccacaaagccgagcaaaattcccaaaatcatggcaatcaagaaagctccgagaaaacgtaaaatcacgtagtaccaagagttcccaaaggccgtataggtcgcaaaaagaacgactggattaatgataggagctgttgccatgaaaggaatagccgtgtagctaggcacttttttctctaaaaagcgcgtgataattggaacaatcccacactcacaagaagggaaaataaaaccaattagagttccaaagagaatagccaggaccttgtttttcggcaggaagttttggaccttttcaggagtcacaaagacttcgataaagccagacaagatgcttcccagtaaaacgaagggcagggcttcgataataatagatagaaaaactgccagaagctgcaaaacgctatctggtagttgatgaaaaatagccataactattatttcttcttatcttcttgaagacgtttgtccttcttaggatcagttcccgccttttcaaaatcagggatagccgcaaaagatgccatcatgctttcaagttcatttgtttttttctgaataaccgccataaaaagcctccgagttaaaataagatactaagggcgtcatttctaagagaaaagagggcatcgaccgaagaagctctgcttctaggaagatgcatctattttccgaaagaaatagcccttaacaataggtctacctttctattatactacctcttgcttaaaaattctcgcttcagctacaaggttttctacccaagcaaatctcctatcgtggtataatagaacttatggaaaatcgtaatctagagacattggctcaggaattgggcctaaaaaaacaacaagttgaaacagttttggaattgaccgcagaaggcaataccattcctttcattgcccgttaccgtaaggaaaaaacaggcaatctggatgaaacgcaaatcaaggctatcattgatatggacaagtccttgactactcttcaagaccgtaaggaaacagttctggctaagatcgaggctcagggtaaattgactgaccaactcaaggcagccattgaagctgctgaaaagttggcagacgtggaagaactctacctcccctataaggaaaaacgccgcaccaaggcgactattgctcgtgaagcaggtcttttcccattggctcgtcttatcttgcaaaatagtcccaacctcaaggctgaagctgaaaagctgacatctgaagcctttccaacagctgacaaggctcttgcaggtgctgtggacattttggttgaggccttttctgaggacaatagcttgcgctcttggacctacaacgaaatctggaacaacagtgacatcacttcaaccctcaaagatcaatcgctggatgaaaaagaaattttcaagatttactatgattttgaggacaaggtgtctaaacttcaaggttaccgtacgttagcccttaaccgtggtgagaaactaggcgttatcaaggtaagctttaagcacaatcttgagaaaatgcaccgtttctacagtgctcgtttcaaacaaaaaaatgactatatcgaggaagttatcaatcaatctctcaagaagaaaatcattccagctatggagcgtcgtatccgaagcgaattgactgaagcagcagaagatggtgctattcaacttttctctcaaaatcttcgaagcctccttctagtatcgccacttaaaggcaagatggtacttggttttgacccagcctttcgtacaggggctaagttggccgtggttgaccaaactggtaagctcattacaacgcaagttatctatccagtagctccagcaagtcaggctaaaatcgcacaggctaaaaaagacttggctgacctcatcaaaaagtatgccattgagattattgcgatcggtaatggaacagcaagccgtgaaagtgaagcttttgtggcagaagtcctcaaggatttcccagaaacttcttatgtcattgtcaatgaaagtggtgcctctgtctactctgcatcagagttggctcgccatgagtttccagatttgacggttgaaaaacgctctgccatttctatcgcccgtcgtctccaagacccattggccgagttggttaagattgaccctaaatcaatcggagtaggccaataccagcacgatgttagccagaagaaactctctgaaaatcttgatttcgtcgttgataccgtggttaaccaagtcggtgtcaatgtcaatacggcaagtagtaccctcttgtcacacgtgtcaggactcaacaagaccatctctgaaaatatcgttgcctaccgtgaggaaaatggtgagattgcatcgcgtgctgaaatcaaaaaggtcccacgtctcggtgccaaagccttcgaacaagcagctggtttcctccgtatcccaaatgccaagaacatcttggataatacaggggtccacccagagtcttacccagcggtaaaagacctcttcaagcagttggatatcacagatttggacgactctgccaaagagaaattgaaggctcttaatcttaaagaaacagcagaagagctagggcttggacaggaaacccttaaagatatcattgctgaccttttgaaaccaggtcgtgacctccgtgatgattttgaagcaccagtgcttcgtcaggatgttcttgaactcaaagacttgtcagtcggacaaaaacttgaagggacagtccgaaatgttgtggactttggtgcctttgtggatatcggtgtccatgaggatggccttatccatatctctgagatgagcaagagcttcgttaaccacccaagtcaggtcgtttctgttggggatttggttaccgtgtgggtatcaaaagttgatttggagcatgaaaaactcaacctctccttggtgaatccacgtgaatctaactgattatgttaagactgtttctatagaagattttggctgggaatttaagcatcaagccttgtggaacaagcgtctccggaccactggagggcggttctttcccaaggatggacacttagatttcaacccaaaactctatgaggaacatggtcttgagacctttcgaaaaatcgtccgccacgagctctgtcattatcacctttattttcaaggtaagggctacaagcatgttgatagagattttaaggacttactagccaaggttgaaggccttagatacgctccaaagatgcaaggtcaaaaggagaagtactacctctatcagtgccaatcttgtggtcatatctaccgtcgcaaacgccgtgtcaatacacagaagtttggatgcggtctgtgtcgaggcaagctcatttttttaaatcagtcctagggctgatttttttaatttaaaaaaatcatataattaaatcaaagaaatgatgggagaagaagaccatgtcaaatcgtttttataagacacgaaaaaatagactcgtcgccggtgttgttgcaggtttggcagataagtttggttgggacctagctttggctcgtatcttggctattattctcatggtttcaacacagtttggaatctttctatacttggttttagcctttctccttccttacaaagaagatatttatcccgaaatcaaacttaaggacggaagaaaacgcaaaaacgctgaacctgtcgaagatgagtggaattggtaagtaactgttaaaagacattgacctgcgattggccttggtgctagtcacaggtcttttttgctttgagaaccgcattgaaaacctttttatgatacaatgaaactagtaaataatcggaggaaataacatgacagtaactgttaaaatgctggttgataagcttaagcttaaggttatctatgggaacgaaaaacttttgtcaaaaccaataacaaccgctgatatctctcgccctggtctagaaatgacaggatattttgatttttattcgccagagcgtattcaattggttgggatgaaggagtggtcttaccttaaaaccttgactgatcacaaccgttactctgttttcaaaaatatgtttagagaagaaaccccagccgttatcgtagcgcgtgagctcgatatccctgaggagatgcatcgagcggctaaagaaaatggcgtagcggttcttcaaggtcgcagcggaacatcatctctctcaggtgacatgtcttggtacctcaacgcacagttggcagaacgtagcaatgttcacggagttttggtcgatatctacggtatgggtgttctcatccagggtgattctggtatcggtaagagtgaaacagggcttgagttggtgaaacgtggtcaccgtcttgtcgctgacgaccgtgtggatgtttatgctaaggatgaggagactctctggggtgagcccgcagaaatcctccgccatcttattgaaattcgtggggttggcatcattgatgtcatgagtctctacggagctagtgctgtccgtaattcctctcaagttcagttggccatttatcttgagaattttgaaaatggcaagatctttgatcgtcttggaaacggaaacgaagaaatcgaattgcaaggcgttaagattccacgtgtccgcattcctgttaagacaggacgtaacgtatcagttgttatcgaggctgcagctatgaactaccgtgctaagcaaatgggatttgatgcaaccaaaacctttgaggaacgtttgaccaacctcattagtaagaatggtgaaaactaatgttagctactattgatcctattgctctaaggcttggccccattagtattcattggtatgccatctgtatcgtatctggtcttttactagccgtttatctggctcagcgttgggctcccgaaaagggaattgaccctgaaaacatcctagattttattcttcttgcctttcctatagccattgttggtgcaaggctctactatgtgatctttcagtggtcttactacagtcataatccctcagaaattgttgcgatttggaatggcggaattgccatttatggtggcttgattgctggtgcagctgtcctctattggtttgctaaacgccatgccattgctgtcttggattttcttgatattgcagcacctggcgttatgattgcacagagtatcggtcgctggggaaactttgttaaccaagaggcttacggaagagcagttagtcatctgaattatgtcccagaatttattcgccagcagatgttcattgatgggagttatcgtgtaccgacttttctttatgaaagtctctggaacttagtcggatttatcactatcctaggactaagacgctttaataagaaactacgtcaaggagatgtgacctcattttaccttatctggtatggtcttggacgttttgtcattgaaggcatgcgtaccgatagcctcatgtttgttggcttgcgtgtttctcaatgggtcagcatcgccattatcatcttgggtgttatcttactatatttgcgaaagcaacgtccagaggcagattataaaatgaaaaactagtcatatagctcagactttgttataatataatgaaaattatcataacaaaggtcactggaaactggagagtttacttcagttttcttgtagcgaccttttaaaaaggtcaaaggagtcttaaactatggcagaaattgcatttcttattatcgcaatcgcacttgctgcgttcctcattgcattgatccctaccctacttcgtacacgtcatgtggtcaaagaagttgaagaaacagttgctgtgcttcgtacagacattaatgtaacccttcatcaaacaaatgaaatcttggctaaggcaaacgtcttggttgaagatgttaatgaaaaagttcaaacaatcgatcctctctttgtagcagtagctgagctttcagaaagtgtttctgacttgaatactgaagctcgttacctcggtgctaaagcaagtgcagcaggagcaagtgtcggtaaggcgggttcagcctttgctatcggtaaagttgcttcaaaactatttggtaaaaaagacaagaaaaaataaggaggtcttttcatgagtaaatttttaaacaccctaatcattggtgcagcttctggagctgcagcagcttacttctttacaactgaaaaaggtaaagctgttaaatcacgtatcgatgaagaaatcgcttcattcaaagaagatcctaaagcttatcaaaatcaagtagtggaaaaagctagcgactacaaagatttggcagtcgatactttccaagactacaaaacaaaatttgaaaatggtgaaatcactgcagatgatttgacaaaaaccgttcaagaaaaaacagctcaagttgctgactttgcaaaagaaagctttgaacttatcaaggagaaaacagctcaagtaactcctgaacaagcggatgttgaagcagaaacaaaagctatcgttgatgatatcgtcattgatattaaagatatctctgaagaagcagcagaagcaaaataataaagaaagcacatgaggctttctttttttagtacgaaaaaaacgttgaccagcagtcaacgtttttgtgctttataatattcgattaggacataaatgcctatctgaccaatgacgctaatggtaattgcccagaagaaggcccagaaggtagccacctgtgctactaagaaaaggaaggcaactaggactgttgaaacacagaagcttgagacacgtccaaagaaaatcatatcttgtagtttaatactattactatttagaccttgataatcttgataattcgtcgtttgaggatgctcagtctcgaaatcttcaatgtgatcaaattgacggtgtaagttgtcagccatgtctgcctcctttctatataaaatatctaaatcactttttcgtgtaggttaaaatacttaatcagtatttcactatttagaatctcattaataataccataaatattttatattgcaaagttttttttgatttttgtgaaaattatagtatttaaaaactaatttaaaatatttagatacggttgtttaaacctaaaaattctaaaaaaatcaaatcatttgtgctataatgtgagttatggaaaaaatagtgattacagcgactgctgagagctacgagcaggcacgtgagctcctagaacttggcgtagatcgtatttacatcggcgaaaaagcttttggccttcgtttgcctaagcctttttcattcgcagagatgcgaaagattgcagagctggtacatgagtctggcaaggaattgactgttgccgttaacgccctcatgcaccaaggtatgatggatgctcttccagactaccttgattttcttgaagaaatcaaggcagattatatcacggttggtgatgcaggggttttctacatctgtaaccgtgacaaacgtcccttcaaaatgatttatgatgcttcaaccatggtaacttctagccgtcagattaatttctggggcaaacaagctggagcttctgaagctgttttggctcgtgaaattccgtctgcggaactcttcatcatggctgaaaatcttcaaattccagctgaggttttggtttacggtgcaagtatcattcaccattcaaaacgtccgcttcttcaaaactattacaactttatcaaaacggatgaagctgttaccaaagaacgtgacctcttcctttctgagcctggtgacccagattctcactactcagtttacgaagacttgcatggaacacatatctttgccaacaatgacctagatatgatgactaaactttcagagctcgttgaacatggttttgaccactggaagttggacggtgtttattgtccaggtgaaaacttcgtaaaaatcactgagtattttgtgaaggctcgtaacctcatcgaggctggcgaattttcacaagatcaagccttcctctttgatgaggctattcataaattacacccagccaaccgtggtttggacacaggtttctatgattatgaacctgaccgtgtaaaataataccccttcctctttcgtttgagagttttccattttcagggaacgaaggagacttctaaaaacaaaaatcgacaatcttgcaaattggagaaattatgactacaactaaaaaacgcccagaggttttggtacctgctgggactttggaaaaattgaaagtcgctgtaaattacggcgcagatgctgttttcgttggtggacaagcctatggtttgcgtagccgtgccggaaactttaccatggatgagcttcgtgaaggtatcgaatacgctcacgcacgtggtgttgatgtgcacgtcgcttcaaacatggttacccatgaaggaaatgaaaaaggagctggtgagtggttccgtgaattgcgtgatatgggacttgatgccgttatcgtatctgacccagccttgattgaaatctgttcaacctacgctccaggacttaatatccacttgtcaacgcaagcatctgcgacaaacgttgaaaccttccatttttggaaacagtatggcttgacccgtgttgttttggcacgtgaggttactatggaggaattggctgaaatccgtaaacgtacggaccttgaaattgaggcctttgtccacggtgctatgtgtatctcatactcaggtcgctgtaccctttctaaccacatgtcagaccgtgatgccaaccgtggtggttgctcacagtcatgccgttggaaatatgatctttacgacatgccattcggccaagagcgaaagagtatccacggtgaagttcctgaagaatactcaatgtcagctgttgacatgtgtatgattgaaaatatcccagaccttatcgataatggtgttgacagccttaaaatcgaaggtcgtatgaaatctgtccactatgtatcaacagttgctaactgctacaaggctgcttgtgacgcttacatggaaagtgcagaagccttctacgccatcaaagatgatttgattaacgaactctggaaagttgcccaacgtgaattggcaacaggtttctactacaagacaccaacagaaaacgagcaactctttggtgcccgtcgtaagattccacaatacaaattcgttggtgaagtagtagactttgatccagccactatgacagctacaatccgtcaacgtaacgttattctcgaaggtgaccacgttgaattctacggaccaggcttccgtcattttgaatgtgatatcaaagaccttcacgatgctaatggtaacaagattgaccgtgcaccaaacccaatggaacttcttacaattaccgtgccacaagaagttaaacctggtgacatgattcgttcaactaaagaaggtttgattaacctctaccaaaaagacggttcaagcaaaactgttcgtgcctaatgacaagtcaaatcaatgggctcctggtagatgatcagagtaggtgtcaacactaccattctccactagatatagttgccctaaaatgcttcgagtgccagaagtattatgcctgttatcagtgtcatgattgcttagagaaacatagctttcgagcttatccttgtcaattgaagcaggacaaggtccttatctgtggcgtttgtaggcatgagatgacaattgaggagtatcaagatgtagaagcttgtcccaattgtcacagtgccttcaacccagcttgttcaaagcactatgatatttattttgaaaaataaaaagattgaagattctgttcacatgaacaaagtcttcaatcttttttagttaaagtaactatgatttttaagagcttttaagactggcttagtcaccaaagcgacgatgagaccttttaagaggtcaggaataataaagggtgtcaagccaacagctacagctgcagaccatcccatttttccgagaaagtgcaggctgaggataccaccaacaaagacaagtgcatctcccaaaacaaaagccacaaagattttccagataggagtctcagcatgagttagttttgaagtgacaaaggcgaaaaatggataggccaacaaatagccagctgaaggtccaaagaaggattggagcccaccgcctccacctgcaaaaactggtagaccaatggcgcctagaatcaggtagagggtagcagcaagtgtcgcctctcttggcttaaggatagcagcaacaagtccgacagcaaaagtttgcagagtaatgggaactgcaccgataggaataacaatttgagctagggcagcaatgatggcagcaccaaaagctggaagaataagtgacagtgtacgattttgtgtcatttttagttaacctttcgtaaataaatagttaacttattatagcaagtggtttcgaaaaagtcaacctaataataaaacgaggttaactgataaacttaacctcgttgtgatatgatttttagacgtttgatttcatcaagttcaatcatgctgatgatcttatcctgctcgataaagatggcttgtcgctccctgtcataacggttgatgtagcccttataggtcttctgattggatgtcagcatgaccatttgattatgatcaatagcatgatagatatcgttaataagttgattctgcattaggtggacaggtttgctgtgacctatttccacaaactgatgaagctgatgctttacggcttctaaaaagtttatcatggtcatttccctcgtttcttgataaaataattatagcatgaaaggtgaatttttgtggataacttcattctaaaacagacaattttcacagaaaaaaacgaataaagctagtggaggtaagcaaatggcagaattttcatttgaaattgaagaaaaactcttggtcttgtctgagaatgacaagggttggactaaggaactcaatcgtgtgagtttcaatggcgcaccagctaagtatgacatccgtacatggagtccagaccataccaagatgggcaaggggattaccctcagcaacgaagaattccaagttctcgttgacgccttcaaaaactaaaacaaggtcagcatggcgctggccttatttttttgtttaaaacgtatcaaagataagtttgagattgagaatggttaggacaatagcgatggcataaccaaggaaggtattccacttggcattgacgtgttttcccatgagtgatttcttagaagtgtagtaaatcaaagggaagatagagaatggcaaggcaattgaaaggaatacttgtgaataaaccaagagttgatccagggtcttttcttgatcgccgtagagaatggctacaacgataacaggaagcagtgcaaagagacgtgtgaacaaacgaataacccactgaggtaacctcatgtggaggaagccttccatgacaatttgaccagttagggtaccagtaatggtagagttttgaccactagccaagagtgccaaggcaaagagggttgaaagtgttgaactagctaccgcaccagcaatcttagagtcctgaagagcattgtacatctgtgagaaagctgaaatatcagaagcatgaccaaagaagagagctgctcccaaaatcaagaggagggagttaaccacaaaggccaaagtcaactggatgttagaatcccaggtcatgaaacggacagccttagtcacgtctttgccatcagaatagtcaaccttacgagtctgtgacaaggatgagtgcaagtagaggttatgtggcataacggtcgcacccacaatcccaagcgccaaggtcaactggttggtatgtccagcagcatgtggctcgaagagcgttggcgtagggagataaccctctaggattcccgtaatactaggctcagacaaggctaccagatagacaaagataaccaagatggtcaaaatcaaggttgaaacaatagcctcgatttttttgaatcctagcttcatgatgagcagtagtaggaagacgtctaggactgtcaccagaatggcaaccataattggaataccaaagagcaggttaagagcaatggcagaaccaagcacctcagccaaatccgtcgccattaaggccagctccagaatcacccaaagcgtgtatcgcaaccatttgggcgagtgataggcagtcgcttgagctaggtccatttgggtcacaatccctaatttcccagccatttgttgcaactgcatagcgattaaagatgaaattaagatgacaaaaagcagactatacttgtaggtcgccccaccgacgacactggtaatccagttccctggatccatgtaacccacggccacaagagccccaggtcccaagaaagccttaagattttgccaaaaacgattattatttggtgtatctatggattggtttacctcagaaagggaaaccttctttgaatatgtcataaacacctctttctaagtcatatctgcctaaaagtgtattatttctagacagaccgacatttttattatagcactaggaggaagatgtgcaagtttttgacttatcttacattggtgtcatagaggacttttcagaattgcctttttatactaaactataagagtagatgatttcatagatgagggagaaaaaataattgaaaacatttcagctaacagctaagaaaaagattaccctggcactcgtagttgtcatcgtggttgctttgcttatctttatcattaacgtgcagatgaatcagcctgataacctacctgccaattacatggagcgccttaaaaatcctggaatgaccggagattacatcagcctctggaagtctcgctggcatgaagaaaacaaagtatggatttatcctgcgaaacaatacgctatctatgcagtagcagctctagcttgtctatcagcttgggtagcagcttcaaaagcaaaattttggaaataagaaaatgcttccctcgaaatgagagaagcgttttttcataacaaattaaagtttgcttgtcatgatagctttttgatagaatactatttggaggaatgttacatgtctaaaaaaatcattaatgttgtggcagcagccatcgaaaaggatggcaaaatcttttgtgcccaacgaccagaaggaaaaagtttaggaggatactgggaatttcctggaggtaagttggaagaaggagaatcacctgaagaagcattaattcgagagattcatgaagaattaaattctcagattgagattatttccttcgttaatgaagcttcctatgattatgattttggaacagttgttatgaaaacctttcatgctaaactcgtttctggaaatctagatttgttagaacatcaggattcagcttggttagagccaagtcgcttgaaaactttgaattgggcacctgtagatagaccagctgtagaattgttatcaaaataagagcatcacttttgtggtgctcttatttattagttatgtaacggtaaagagtgtcagggacaggattatctagtttgaaattcatagtaacaatactttcattaccactttccagtgggcgtactaattcttcaacagtagatggtacgatggtcaagtcacctaaatagtaaaaatctccaccttcagcgtcatctttaatgataaataattttagatctaatccattttcaggtgaattgataattgtttttacatctggagactcaagtgtacgcttgtttttagaaaaccattttagagtagtttcatttaataactcatcttcgtatttgatagtatcactgatttcatcatctttatgataggtgatgaagattggacaagtgttagtgttcttgtctattttatagccaccaatattaagtggaggttcatccttagaccagttaagaagtttacagacatcacgacgtgaatatttttgaccaattgtaaatatttcaggataatcatttgttttatatagtcctgcctcaataacatcattaaagagcaaggcaaaatcagagttcttgaaactatctaaaacctctgggttgagcttataaatgttattctctaaagtaactagagggtctgtaccgaattttttaacctcttgagatttaaggaattgaagacttaatacattttcaacagaggagatgattgagtctttagtagataattgttctgtttccaatatctcaataaatttatctttcgagacttcaccatttttgataagttcctgaagtagaagcagctcatgttttcgtttaccaggaagaagttcaaatgtgataaaactcaaccagttactttcagcatcagtgagttctattgacttgtttgaaaatttgttaataacatctgcatagtttttgaagctgttattgttgaaaaatactatgggatcaatattatcaaaggttaaatggtcgattagcataggggttctaccaagtttattttcaagatccgtataggcatctttgagaattttcatgttagataaaaccgtgtttgtaatcgatttgaaaatttgttctttcgcaacttcctcaaagtttacagttgttagaccactcaagatatttggttcacgcaattcacggcggtaattatctttattcatcgatttatctccaaataatgcaatcggaatcagatagttgtttttgtaattaccaataaaatcaataatagtaacgtaatccttgcttttatgcttacgaagtccacgaccaagctgctgaacaaaaatgatacttgattgcgtgttacgcaacataactacctggtttacggatggtatgtctattccctcgttaaaaatatcaacggtcaagatatattcaagctctccatcttctagttgcttaacaaccttttcacgatagttgatatcgtcatcaccagttaatgcgatggtacgttttccatgttgattaagttttattgataattctctggcttctgcttttgatgagcaaaaaataagtccacgaacttgattattacaaacaccatagaaatcaattttatttagaatatgtttgacacgctcatctgatgtaaggtttgagatatttgatttttcgtcaataagttgaccatcaatttctatgtctttaacgccaaaatagacgaaaggacagagcatgtcattttctaatgcatcttgtaagcgaatttcataggcaatattatagtcgaaaatctcgtaaatattttggccatcagtacgttcaggagttgctgtcatacctagataaaaattcggtgtaaaatggcccataacttttttgtatgaatcagctccagccttatgtacctcgtctattagaatatagtcgaagaagtcttttgaaaaagcttttaagttatcctcgcgagacaatgtttgaatagtcgcaaaaatatatttttttccagttaaatcgtcacccgagtgataaatatgtccttcagagggattaaagcccagaactttttgaaaatctattaaagattttttgagaatctgttcgcgatgaacgatgaataacatgcgttcaggattatattgtttaacgtcaaaggcagataaaaatgtcttaccagtacctgtggcactgataacgagtgccctatcttttccctgttcccgaatatttctaagtccttctagtgcagcttcttgcattttattaggaacaattttttcagctgaataagggagtttctcttcgtcattaatctttgtgagactaataaccttctttctcttttgagcataggtatcaattatttcgggtgttagtaactctgattgttcccaaatacggtcaaattctgatttggtattttgaatgaattccccgttatgagtagaggtcagtttgatattccactcataattgatttttaaagccgtatgagtgagattggaactacctgaaatcaatacctgtttaccagtatgttcgaaaagatagaatttggcgtgcatctgcattttttcgggcgttaaacgaacttcaacatttttaagcttcagtagctcacgcattgcatctgggtcgttgaaatctagataaggggaaatcaagatttttcctggcactttcttgtccattagatctgataactgagacttaatcatggcaattccatttttagtgacaaaggcgacagaaaagtagaaagcagtacacttactcaattcttcctgtaggtctgtcaagacatagcgcttttcatcactattattcacaagaatttggggagaataaccaccctcttgatatttaatgttatcaacaaaaccaaactttagtgattttatcaaagtgtcctgaaataaattaattccctctggcattgtataagccctttctaagaatacaaattactatcattatatcaaaaattagcttctaaataatttgttcaattagaagcttgttgacttacgtgggtgaagtgattcattacgtaataataagttataaaagcacatcatttttgtgattgaagagggcacttatcgaggttttccgatgtgaaaaacatctgaaacaatgggtcactgcctcaaaagcaaaattctggaaataagaaaatgcttctctcgattgagggaagcgttttttcatattatccgatgtgagtcttatattgattgaacatttcgtcgatatcctcttcaaccaagtgatagattttccaatcaaattcagttctagcaacatcatcaaccaagactgtataacaaaaatccatataatcttcataaaaatcagagatgaaggggaggagtgtgtcactaatatcagatgaataaagtttttcatcaagatgtttaaagagatagtctgtacccgtaatcgtttcactcttgagtttttgtgcatcttcaaggttaaatccatcactttggggattcagaaaatcatgttttgctagccaaactacgaagacactgagatgaaaggcagctcttttgctaatctctagcatatctgatttgcttagtttttctgacggtatatcattttcttcacaataaaatacaagtgcatgatcgaaaaaataatctgcgcggtctatgggaaagtctaattggctttcttctctctttgtctcaggctgttcaattacagttgattttttcttaaaaagggacttcagttttctaaacatctttatacctcatataaaaatatcccattattcaaataatgggatatgattattatttcatcgttgggaacaacaagacatcacggatagttgttgtatcagtgaggagcatgcagagacggtcgataccgattccgagtccacctgttggcggcataccgtattcgagggcttcaacgtagtcgtagtcgatgcctgttgcttcgtcatcaccgagttctttagcagcagcttgtgcttcgaaacgtgacaattgatcgattgggtcgttcaattcggtgaaggcatttccgtactctttagtcatgatgaagagttcgaaacggtcagtgaagcgtgggtcttctgggtttttcttagccaatggagacacagcaactgggtgaccgtaaacgaatgttggttgaatcaatgtttcttcaacgaattcttcgaagaaggcgttgatgatgtgaccaacttcagtgtagtgcttttcaactggaacattcttttcagcagcgatagctttggcttcatccaaagtcatgtcttgccagaagtcaacgccagtgatttccttgatagcgtcaaccatgtggatgcgtttgaatggttcgttgatcttgatttcagttccttggtagttgataggtccgtcacctttaacagctttagcagcgtgttggatgataccttcagtcaagttcatgatatcgtggaagtcagcgtatgcttggtaaacttcaatagatgtgaactcagggttgtgagtagcatccataccttcgttacggaagatacgtccgatttcataaacgcgttccataccaccaacgatgagacgtttgaggtgaagctcagtcgcgatacgaagcaccatgtcgatgttttgagcattgtggtgagtgatgaaaggtttagcagcagcaccaccagcttcattgtgaagaacaggtgtttctacttcaaggaaaccttgagcatcgaggtagcgacggatttcagaaatgatttttgaacgtgtgacaaagcggtcaaagctttcacggttagaaatcaaatcgaggtaacgtttacggtagattgtttcaacgtctgaaagtccgtggaatttctcaggcaatggacgaagggctttagacaagtgagtgatatgagtagccttgatagaaagttctcccatatctgtacgcataacttcaccttcgacaccgaggaagtcaccaaggtcagctttcttgaagatttcgtagttttcttcaccgacagcatctttacgcacgtagatttggatttgaccatcgcggtcttggatgtgggcgaagccaactttacctttaccacgtttagtcatcaaacgacctgcgatagtagcagtttcgttgatttcgtgcaattcttcttttgttttgtcagcgtatttttcttttaattgaccagatgtagctgtgcgttcgaatcgcttaccaaaaggatcgattccttgttcagccaaggccgccattttttcacgacggacaatctgttgatcgttcaattcttccatgtgttgatttgacatgttagtcctccataaaatagtcgtaattattgtatcataaatcaccttctaaagataggacaaatgattaaatgtcagataaataaagctaggatttgtctatttttaggacaaatcgtcaactagcattaacctttgattagaaagttatagaatttattgacaaatataataaaaagggtgtacaatagcaaagtaagtttcgtatgatataaggaggaaatacgatgaaaaagaaaaattatgttagtaaagccgtgatgcttggcgctttactagcacctattgggatgcctacggtatctgtgttagcagatagcttttatcaaaatcaaacgagtgctcacgctgctgatattacaaactggattgccagcacacctgaacaaattacaaataatttgacaactcagaatatcaatccacagcagttagatggtcaacagtacgtgattcaatggggagataccttgtggggaatctctcaagcgactggaatttctattgaaaaattagcctacgataacaatattcagaatattgatcttatctttgcaggtgatatcctcatcttgaaacgtgatggtgatgtcccagcaggttaccatgtgactggtaatggttaccgttgtgcacattctaagattgttatcaacaactactacggtgataacaaccgagtgattatcaataatagcacttttgtctctgatgaccattctaagaatacagtgatttacgctccagataattctgacaatagcgtttcattctcaaataacacgacaaacaataataacgataaagacaaagatactaaagattctaaagatggcaaggactcttcttcgtcatcatctgaatctaaagatgcttcatcaagttcaacaagtggatcatcattttctgcatcaagctcaacagcaagcagtagtgaaagcaaagcaagtacagaaagttctaaggaaaaagaattgactgatgatgctttccaagacaaggttcaagaagaattctcaaatatttatcgacaaaatcgttcaggtggtccagcatggactttcttctcacatgcagatgataagactggtgtaaatgctacagctaagaaggacactgaaagcacagctctctaccttcaaggtgaaacgccaaaggctaaagatattgttgatggacctaaagatggtgccaaaacggaagctaatgccaaggctcttgctcaaaagatttatgacgctcttaacagggatagtaagatgtcagatcttatcaagtcaaaatatgctcaaattcaggtaagttataagggtgataagtgggctttcaacgttgatgtttacaaggaaaaagaaagttcatcatcaagcactgaaaaatcatcagaatctaagtcgtcatcaagtgatgattctcaaacagaaacacgcatgagttcaagctcatcaagccttgaacgttcatcatcaagttcttcaagccacactgaaacagactcagaggcaactttctctgatctaactggtgatgaatagagaggggcaagacatgtcaaagagaaatatcattattagtgtcgttcttgcttgtctcttggttacgggagctggatttggtgctttctattactggggaacacaccatttagatagtgttgtacctggtaaggtttaccaatactcaagttctctaaacggtgagatcaataatcgtgtcatgtatgtagccttccaagaaggtggtaacaaggcacttgtgagtcaagatcgtacgacagtggttaatgctgctaagagtcagactgactttgacaaggcctataatgaccaaacagctaagtgggaatacagtgtgacaaaaacaacattgactcttggtaaaaaagaggacgatcaattgtcacaatggcagtacaacaaggtctttgcttatggtgaccacttcacatcaaaagatttctattaccagattgccaaaggtggtcagggtgaagtcaaacaaaaaatgaccttcaaagaaattaaataagtatctgaatacgacaagatgctttaggtttgggacaaattgttccaaacctttttctatcttcaaaacacgaataatcttttcttaagtggggtcaaaaattgaaaagaaagggcaaaaacggtataataagactgtttgggcaattgcattctgataaaaaaacagacgagtaagattgccccaagacagttgacttaaagcttacttttgcaagacttaggatttcactaggagtggctgatgcagtagtttagttgttagacctcttaatttacctaagtccctgacaagagaatgatataagaaagaacggacagatgattacctctattgtttttgacgttgacgatactatttacgaccaacaggcaccttatcgtattgccatggaaaaatgtttccctgactttgatatgagtcacatgaatcaagcctacattcgtttccgccactattctgatgttggttttccacgcgtaatggcaggtgagtggacaaccgagtatttccgtttttggcgctgtaaagagacccttttggagtttggctaccgtgaaattgatgaagaaacgggcaaccattttcaagaggtttacgagcatgagttggaaaatatcaccatgcttgatgagatgcgcatgacccttgatttcctcaaggaaaaaaatgtgcctatggggattattaccaatggaccaacagagcaccaacttaaaaaggttaagaagttgggactttatgattacgttgatcctaagcgtgtcatcgtcagtcaggcgacaggtttccaaaagcctgagaaggaaattttcaacctcgcagctgagcaatttgacatgaatccatcgacgacgctctatgttggagattcttatgacaatgatgtcatgggtgccttcaatggtggctggcattctatgtggtttaaccaccgtggtcgtagcctaaaaccaggtactaagccagtctttgacttggaaattgatagttttgagcaactctttggagcggtgaaagtccttttcgaccttccaaataataaatatatctttgatatcaatgataatgaaaatccagtccttcaactaggtatcaataatggtcttatgatggcggctgaacgtcttcttgagagcaatatgagtattgataaagtggttatccttcttcgtttgaatgcgaaccaggaaaaaatccttcgtatgaaatatggaagataaatagagcggcctcgtatggccgttttatttatagagagggaagaaataatggcggtgaagctcttaaagtaatagctttaagggctttttgagtgcaaaaaagcgacccttattcaggatcgcttgtcttatgaagtcaggcaatgatttagctaatcttgttttgttcatccatataagatgtatcattccaacatttaagagcgaagtgctcgaaatcattggtttcgagaatagtgacagaagcattgtcaagacctcctgccttgcgaagaagaccaggttcaaaaccaaggagggtacggatagaagctgttaggttagctccgtgaccgacaatgaggacatttttagcatcactatctttaagtgttttgacaaattcggccacacgtttggttgtctggtaaacagattcagcttggaagtcattagcacggaagttggctaggttatgacggaaggcatccatttcttttggatagatggcttgaacgagtgcaattttttgtccttccagtttgccaagctgccattcacgcaaagctttagtataggtaactttagctttaggtttttgagactccatgatgagctctgtagtttttttagcacgtggtaggtcacttgagaagaccaagtcaaaatgagtgtcactgaggtagtgacctagctcacgtacttgttcaatagattctttaagcaaaggagagtctcccttggcgccttgaagtcggccttccaagttccactcagttttaccgtgacgtacaaaatacagtttcatgattactccttaatatcagcaaattcagcattaacaaaatcagcaagttcttgactattgatacggatagagcgcccaatttcccctgctgagacaataaggaagccagcttcttgagcagacttgtcaatgtagatagggaaattgtgtttttggcgaattcctacagggttgttagccccatgaacatagccagtagttttttggagatccttttgtggaatcatttgaactttcttgttccctgaaattttagctaatttcttttcagatagatgctcagtgatgggaacgataccgatgactggtcctgtcttatcccctttgagagcaagggttttataaatactctcacgtgccacaccttctggaagttcaccttctaatccattgaagtttaaactgtcatggtcaattttagctttatcaagaatttggtcaaccaaggtcttcttgactttgcttttctttgccattgtcatatctcctttaaccttatgcatttctacatccattataacacaatcgtcttaacacgcctaagccaattttgacaagaaaaaaaccagtgttctaggcaccggtttctattgactactagatgaacttgtcgaagtagtcttcttatttttagttggtttttgcttgatcttaccaaagagtttttcaaaggttttacgtttgtttttctcaggattgatttggttaagatctagtatattgtcgaaaccaggtaggcttccttgtgatgtatattggtgaaggtcatagtcgatttcagtatttggtaaagcctcataataaccagaatcggtaccataggctggaatccaaacagcatcgaagtttttagttgaaacttcttgctcaagcatgaaataagcaccaatatagagaccaactttttcagctccaagacgtttgagctcagcaagaaaggcttggacaccttcctccatgttagacatggtttcctcttcaacgtcaatccagtaataggtaggtttatatggagaagcgtttttgtagaaaatacgagcttcttccttcatctcctttacagaagtaccttgagcgtaagagtaaacggcaactggaacgtcacgttttttgagttctttgatatgtgttttaaaagatttgtcgattccatttgaacttgcggcattactatccttactaatctgtgatccaccaaagacgcggacgatagcaccagaaatatgatttgacaagacatcgtaatcgatatcctgaggtagttgccaccccgaaaggtcgataatgggattgagtatcagctcctcgtcggaactgctagatgtactactggttgttgtttttggtttagtagcagaaggaatagcagatttcacgttttgaagatgcgcctgctgtttggacgtattgtgaatatttgcaataactaatgctaatcctaaaagagctagaaccacgtaaacaacgatcggttttattctttttctcattactcccattctaccttaaatagcgcaaaaatgcaaaatagagtgtttgtaaattctgtgagagatattaaagtgactgattttcaaaaagcctttgtagtgctgacttaggcacattttatgaataagggtgttttgagctagtcctgaattaagtgaatttttcatttattaaagcaagaaatttagcttaaaagtcagtttcttccttgaaactagcgccactagtggcatcagaccaggcgacaagagcttgagcagagttatccagataggtcttgagaggttgcttcaaatcataaatagtctcccaaaatcctaggacctttccttcgttgtcgatagcagcttggtaggtctggataaggacttgatcaaaactgtcagttggaatctgataacttctttctttggtaggagacgctagaacttcagatacaatccaatcaggcagattttcaggctcatgggggaagaaactaccgtcagcgccaccgttgtcgtagagaaagtttccttgggcatcataggctgctaacttatagggcaggtgattcagtagtgtttttaaatcgttcataccttcatcatagcttctttcaggagaaatggcaatgctttggattggagacaatattatcgtaggatagtatcagtttgtctgaggaaagtattatctcttggagcagtatcagggtataataaagtaaaagaagactcgaggtgaaaacatgtcaaaacttatttttctagatgttgatgggacattggtggattatcataaccgcattccagagtcagcaatcaaggctattcgtcaggcgcgtgaaaatggacatctggtctatgtttgtaccggacgtagcaaggcagaaatgcaaccagaattatgggaaattggcttggatgggatgattggtggcaatggctcttatgtggagcatcatggccaagtcctcatgcatcagttgatttccaaggaagatgcagcaaagattgtggattggctgacagagcgccatcttgccttttatctggagagtaataatggcctctttgccagtcctgattttcgggagagggcgcgtgagacacttaagacttacgctattcaaaaggggcaatctgcagagtctgtggagggcaaggaaccagaagattttcttcatggcctccagtatggtggggaactctaccgtgacgacctaaacaaggtcagtttcgttttggagtcttatcaggatcacttggattccaaagaagcttttccacagcttgaagcccatacttggggaggtcgaggtgaaacagccttgtttggtgatttgggtgttaaggatattaacaaggcccatgccattgatgttcttttggaatatttgggggctaagccttcggataccattgcttttggtgatgccaagattgatatccctatgttggaatactgtgaggttggcgttgccatgggaaatggtggcccagaaatcttggctatggcagacctagttacagacgatgttgaagctgatggcttgtataaggcatttgataaattgggcttgttgcaatagaaaaaactgagttcctttttggagctcagtttgtattttatgctggtttacgaccgataaattttttcaagagatataagagatagccaacagcgatatacccagcactgatgaccaggacgtttaccaagaccttgttccaaccaaatttattgacattgataaagaagtaggcgaaggggctatctttagctcctggaattgggagttttagcaccaagccatttagaagggcaaaggcaaagtaagagagagggaccacggaccagtaaattggctcacgtagacggtaggctttcttagcatcgaaaataagggtatcaagcaccaatccccaaggcacaatatagtggaccaagaagttacggagagtccagaatttctcaggctctgtaataggggccaagaggatgtgatagatgactccagtgatgaggatggccatggttacaccacccttgtaacgcaagagtttggtgttagtcgtcgcatcctcttttttaaagtcatagatgataaagaaaatcaaactagagaagaccaggatattggacaaaacagtgtaatagagcaacatgccccaaccatcgtcatggatttggatagagactcctaccaaaccacagagagctaataagatacggtaaaatcgtgaaatagtcataagcttccttttcctaataaataatctctcttatcatatcacatttttcactaacaatttattgaaaattctagtaaaatcaaggtaagaaagactttaaggagtaatgatgtccaatttaatcgattatcttgaaaaggttaaggatttgcctttcgacaaagagcctcttaatattttggataaggtttgcatcaatgagattggctacctgacttatgaaaaatggttctcagcaagtgatttgaaggaaaccatcaatttacatgactatgctgaagggaaggacctaaatcccgattataccttcatggtgactaaggaacgtgtcgatttggctgaagccatggtcaggtctaggcgtttcactggacttaatctaagtgactactgtagtgtcttggacaaggaagtcgaaaaacagtttgcagctatgattttcagtctgcctgaattgggctaccagcagattgtctttcgtggtaccgatgatagcgtcattggttggaaggaagattttcagctgacctacagtcgggaaattcctgcccatcgctcagccatggcctttctggagaagcacttgccaaacctcagtggccatatcgctgtttctggacattccaagggtggcaatcttgccctctattcggctgttcagagttcgactgtcctgcgtgagaaaatagcagagctcttgcttctggattctccgggattgatgaaacccctcttagagaagccttcttaccaagagttgaaaactaagatgacggttatcagacctcaagaatctgttgtgggagtcatgctctactgggacaagcccgcaaagctcgtagcagcagatggcattggcatcgctcaacacaatgtcttgctttggcaggttgacctggaaacaaatgattttgtttatgtggaccagcccacagacctgagtcaacgcttagaagagaccttccaagaatggattgagaccttgccaaatcaagaactcaagcaagtctgtgatttattctttgataccattcttgattctggaattgaaagtctggatgatattgggattaaaactctccctaagctaggccaactgttgcaagaatttggcaatctctcggaccaacaaaagaaggtcttgcaggatggtttcaaccagttactctggatattctggaagtcaggaaccaaaaaatctaacctgcccaagctagaacttcctgatttcatcaagaagttgagtgaattaaccaacaacgattagaggcagcggaatcatagaggaggatattatgcctaaaaacgtacttattacaggagcaacatcaggaattggcgaagcaacggcgcgtgcctttgccaaagagggagaaaatctcatcctaacaggtcgccgtgtggagcgcttagaagccttgaaagaagagctccaagcaacctatccaaatcaaaatgtttggacctttgccctggatgtcacagatatggccatggtcaaggatgtttgccaagccattctcaaaggcgtggggcaagtccatgtcttggtcaataatgcaggtctagcacttggcctaacagcctatcaagactatgaggagtgggacatgctgacaatgctcgataccaatgtcaaggggttgatgatggtgacacgtcagattctgccaagcatggtagctgccaatgaggggcatatcatcaatatgggctctacggcgggcatctatgcctatgcaggtgctgccgtttactcagccaccaaggccgcagtgaaaactttcagcgatggcttgcgtatcgataccattgccacagatatcaaggtgacaaccattcagcccggtatcgttgagaccgacttctctcaagttcgctttcacggtgataaggacaaggcagccaaggtttatcaaggtttagaggccctccaagcccaagatattgctgatgctgttctctacgtcaccaaacaaccacgacgtgtgcagatttctgacatgaccatcatggcaaaccaacaagctacagggtttactattcataggggagagtaaatagaagataaaaacatggcaccaagctgtgttttttgtttgaattttcccaaaactatgaaagaacccgtgaaaatgctataatgtaagggattacgacaatattgaaaggataagtcatgccacctgttactccagaacttgagatagaacgtcaattaattgagcaattaacttctggtgagagccagtggacctatcgcccagatttaaaaaacgaaggtcaattatgggacaacttttttgagaagttagcgcaaaataacgttgccctactcgctgaccatcccttgactgagcaggagaagcgccaaatcaagaaccagcttaacttcattaactattatgaagctgctaagtggttggcgggtgaaaatggtattgctaaagtcgaggtacagcgtgaagatgctagccttgggactatcagactttctgttatctggcgtgacaatatcgctgctggaaaatccagttacgaagtggtcaatcaggtggaacgtgacaaggcttatccacaagatcaggaccgccgtttagatacgacgctgatgattaatggccttcctcttatccatatcgagctcaagagtcctcgtgtggcttttttggatgcctttcatcaaatcaaaaaatatgaccgtgaaggtaagttacgtggtatctattctgcccttcagatgtttgttgtgactaataaggttgacacacgttatatcgcagctgcacgagaagataagctcaataaacaattcttgacatcttgggtggataaagataataaacccatgaccagtctcatggactttgcccatgaggtcctgtctattccacgtgcccatcagatggtgatgcagtactccgttattgatgatagtaagaaagccctcatcctcttacgtccctatcaaatccatgccatcgagtctgtccaggatgcctctcgccgtcaggaatcaggatatatctggcataccacaggttctggtaagaccctaacgtcctacaaggtggctcgcaacctcttgcagattccagctattcagaagacgattttcgtcgtggaccgcagggatcttgaccagcagacgacgtcatccttcctttcctacgccgctaatgatgtcatcgatattgacgaaacggacaatacccatgatttggttaagcgtttggcaggaaatgataagcgtgtgattgtgacgactatccagaaaatcacaaccatgatgcgcaagttccaagaaggtaaatatcaaaaggattcggaaaaaatcaaggaccttcgtgtggctttcgttgtggatgaatgtcaccgtgcggtcacgcctcagactcaaaaagacatcaagggctttttccacaattcgctctggtatggctttacaggcacaccgattttcaaggaaaataaacgcaagcaattaggtgatttggcacaaaccacccaccaacaatatggcgaacgcctccatgagtatacggtcaaagaagccatccatgacggggcagttctgggattcaaggtggactatcgaaataccattatttcgccaattcctgaagaagaccttcctgactctgtctatgaagataaagagcacatgctagaagttttggatgctatcttaaacaaaagttatcaacagttgggctttccaaatggtgtgggtaagacctacgaggctatcttaaccgttaagtctattccacaggctcaggcctattacaatttgctcaagagtatcaaggccggacaggaacgtgtcaaggtgtcagagcgggttaagcgcgtgttacctgattttccaaaggtgacggtcacttactccgtgtcggaaaatgaagaagaatctatcggctaccaagagcacatgaagcaggtcatggacgactacaatcaagagtatggcacccattttaatatggctgatttgcgtggctttaacacggatatcaataatcgtttggctagaaagttagacaaatacattcctcgtaaagagcagttggatttggtcatcgttgtagaccgtcttttgaccggttttgatgccccatgtctatccactctcttcatcgaccgtaagcccatgcgtccacaggatttgattcaagcctttagccgcaccaaccgcatctttgacagtaaaaagcgttatggtcatatcatcaccttccaaagaccagaggcctttaaagaggctgtggataacgcccttagactctactcaaacggtggtgaaaatgacgtcacagccccagactgggcagaagaaaaagctaactttatccaagcctggatagattttcaagtgaaagtggaagatgtggaaaactatgtcatcatgattgagcaggccactagcccacaactccgtcgtattgccaaggcttaccaaacctttgacaagtatctggcatctatccgtgtctatagcgaatacgatgaagcggctatctatgcggagacaggactatcagatgaaaagctcgaaacctatctcggaatctatcaaaatatcctagcagagcttaaaagccgagctgaagacgatagtgatgataatctctttgacatccactacgaactggaatccgtccaagtcgatgagattaactatgcttacatcctgaccttgattcaaagtatgattcagcaggaagaagatagtccacaggccctcagcgacaaggatatcgaaactgttgataactatatccagagtctggaacgcaccaatcctaaactagccgaaatcatccgaaacctgtggaaagaagtccaagccaatcctaaagattaccaaggacaatccataactggtgtcttggacactatgattgaagccatcatcgacgaccatctcaaacgctttgccagagaatggtatgtcggactcgatgaacttcgttactatgtccaacactatcgtaaaggtgctaaaaagcaatcaggagaaagccagctcaccaagagccaacgctacaaagactacaaagcagaaacggctgatgccctcaacccgctcagctacaaaaaacacatcaaagaagcctataccaaactcattgaagaagtcattgaaccattgagagtggggaggtagagggaatggaaatatctcaactagacagaatttcatattcaattttgttgcaagagactttagaattaagacaagttttacagtcaattgtaaattctcaagatactattgataattatgacatctttattccctttctacctattatgtcttctgtgtgtctcggttggtgtgatttatttacgaaagaaggtataaaaatagaaattcctgatatagaaggttatagttgtgtaaggttgctaaaaaattgtagaattggtttgaagttatattgtgaccagagaattggcaaagcaactaaacaacttaagaagaattctgaagaaacatatcggttattaaaaactgattataatatctttcaaagattagtcgtttctatgttagggcaatgtgactttggcgtttttacaattaacgaattaccttatgggaatacgagtcaactttttctttatatctcagacgtaattaattttgaaaggtataaatccctaggagtatgggaaacagaagcgcgaaaagttgtttttgaattttctaaattactttcccaatttataaatacaattatagactcatttgctaaatctatagactcatttgctaaatcgaatatgattgataaggactcccaaattgaattggtgagattcaatttttcttataatgattactttctaattgatgaaaaacgtagaaatatactaaaaggtgatttacctatagaaattcaattacaattatttaatattctttgccagaataattttattatcaatgttttgccactagtgttccaaagtggcggtttattataccatagatcaagactacaaacatatttagtaagtgttaacactattaaaaaaattattaacaagtttccaaatgagaagtatcaaaagcagctgaaggaaattgtagaggttaaagaaatttattttgacaaagatagtgtcttaaggaataatatctttcattataagattgaaggagtagatgattccatcttttcaattccagaaaaatatttttatgagtttattgaatttaatagtagggttgaattcaatgattttatgcaagtaataagtgaagaaattataaaaattaataaagttatttataaaatggttgaattttgttaaaaattttcagttataatgattcgaaatagaagggaataattatggaagaaaaaattcacatatactctgatgaatcaaatcatgataagagtattactaacaaagaaaacaatataaatattgataacgaaggtttgtctagagaatatgttagatcctttctaatgattaagacatcttgtttagatgatgcagagaataaattaaataatttagaaaaaagatatttttcttgtcaagaagatgaacccaaaggcaaggtaattttccaacttactaaaaaaaatggattaaagaatttatctggggacgctacaaaatttcttttagatttacttgattttattgaagaatttgaaatccatatttttcttgtagtttttaataaatttgaatatatcataaatgatagtattgaggttgatatagatcgtttttcgaaaaaatataaaccgattgatgatgatagagaaattaggtattctttttcgaaatatttcgaaaatcattacaatgaaaaattacgtaaagttttgtttagtagaaaagattctcaaacagattataaaataaaaaaagcaatctacgagatgaattgttctttgaaacaacatgaactaaaaaggaatgaatggttagtaggaaaaaatttatactctcttgtcgataatggtattgttaaatttaatacaaaagctacatataagtgggattatacatttgaaagtaatgctattatcgatatagttgaggaagtttataaaaataaaaaaataatttcttttgataaaggaactaaagtgagtactgtcttcaaagaactcttagtttcaaaaaatattacaagtattgaagttactgaggatttagattctaaagaggatatatttattagactatctgactactttgcgacattttttggaaaattatccagatcatattcaaattcatttaagttaaaagatttcgaaacaggcaaaaaaaattatagtacagttgaatccattcctcaaagctggtttgaagtagatgaaacacaattttatctagcaaaaagaataggagaattaattaataaaggttcagtaattttgttgcacggtattttagcagatactccaattggtttaaaaaattattttcagtttatctctgattttaaagagtttagtgattatcaagcagtagataatgtgaaattgagtcaattgaataatcagagattatcagaaacatggaatactagttattcaaaacaaggaatatttttttcaccatatgatgcaacatatggagctttaagcgaaaattttggaaagtcttagtagattaaccaattatagtattgaaatattaaaatgagacaattaaaaataagatttaaaaaatataatgatgtttgggataatgttaagttaacagaaatagcacccattgtaatggggcaatcacccgatagtaaaaactatactgataatccaaatgattatatattagtacaaggtaatgcagatatgcagaatggtagggttgtcccaagagtctggacaacacagattacaaagttagccgaaaaaggtgatctaattttaagtgttcgagcacccgttggagatataggtaagacagactacaatgttgttttaggtcgtggagtagcagcaataaaaggaaatgagtttttgtttcaactattaacaaaaatgaaacaatatcactattgggcaaaattctctacgggatcaacttttgaaagtattaattcaaatgacataaaatcagctgaaatttatttgcctagtccggcagaacaacaagccataggctcccttttccgcaccctcgacgaccttctatctagctataaggacaatctcgctaactaccaatctattaagacgaccatgctctccaagatgtttcccaaagccggacagaccgttcctgaaattcgtttggatggatttgatggtgagtgggaatgcgtaaagatggaagatattttccaaataatagatggagatagaggtaaaagttatccaggagaaagtgacttttctagttttggtcataccttatttttagatactgggaatgttaaaaagacaggattagattttagtacaacaaaatttatttcagaagagaaagataaagaattaagaaacggtaagttgatcttaggagattttattctaactagtagaggaacccttggaaatgtagcatattatgatgaaaatatcaaaaaaagatatagttccgttaggataaattcagctatgcttattttaagacctttattaggtgataaaatatctccagaatatattttagctgttttacgtggaaatttgattagtgactttatgaaagtaaatcaagttggttccgcacaaccacatattacaaagaaagagttttctaagattaaagtattagtgccttctaatattcgagaacaaaaagctatcggtgcttatttctctaatctcgataaccttatcaactctcaccaagaaaaaatttctcaacttgaaacactcaaaaagaaactcttgcaagatatgtttatctaaccttcaaaataatccttatcagtacccatcagcacaccatttttcgaatagtataagtgagtccctttgatcctttcaaagggtgcttcttggtatttaataacttaaaagtatttacttttaataactttagagttataataaattcgaaaagagattgctttgtgcacactatttatttttataaggacaaacaggggaatcaaccggtcttggactacatgagagagctagctcgtcacgatagcaaggaccgtcgtatcaaacttaacaagctcaatgaactacatcgagcttttgagccagcagggaactcgtgctggccaaccctacattaagcatctggatgcggagatttgggagttgagacccttgcggaatcgtattttattcgtggcttggctggatgggagctttgtcttactgcatcattttgttaaaaagacgcaaaagacacctagacgagagatcgagaaagccaagcgggagttgcaagatttgaaggaaagagggctaagagatgaagaatagtgccatcggcagcaattggaaagatgtgagagcagagctcttcaccaaggaagaaatcctggaaagtgatctccgggtcgcgattatgacagagctaatcgaggctcggcatgaaaagggcattagccaaaagaaactagaagaactcagtggggtcagtcaaccggtcatcgctcggatggagacaggaaagaccagtcctcaattggacacggttttaaaagtcttagccagtctgggcaagactctcgccgtcgtcccactggaacaagaaaagatctaaaagaaatcagaaagaattactatggaaacaacacaaacctcccagtcgctttatcaagccctgtggaactcagcggatgtgctccgctctaagatggatgccaatgactacaagtcttatctcttgggcatggtcttttacaaatatttgtcggacaagatgctctttttcgtggcagagaccatggaggaggagacagaaagcttggaagaggcactggcggtctatcgtaaatactacgagggtgaggagactcacgaggacctcttggcagtcatcactgatgagatgagctatgccattcatcctgacttgacctttacggccttagtggagcgagtgaacgatggaagctttcagttagaggacttggctcagggcttccgtgatattgagcagagtgacgagctttatgaaaacctttttgaagacatcgacctctactctaagaaacttggggcgactcctcaaaagcaaaaccagacggtagcggctgtgatgaaagagttggctgtcctagatgtggcaggtcatgcaggtgatatgttgggggatgcttacgagtacttgattggtcagtttgcgacggattcaggtaagaaagctggtgagttctatacaccgcaacctgttgccaagctcatgactcagattgcctttttaggtcgtgaggacaagcaaggctttaccctttacgatgcgactatggggtcaggctcactcttgcttaacgccaaacgctattcgcgtcagccacagaccgtggtttactttggtcaagagttgaatacctcaacctataacctggcacgcatgaacatgattctgcatggtgtgccgattgaaaaccagtttttacacaacgcagataccttggatgaggattggccaacccaagagccgactaactttgacggtgttctcatgaacccaccttattcagcaaagtggtctgctagctcaggtttcatggatgaccctcgtttctcaccatttgggaaactggcacctaagtctaaggccgattttgccttcctcttgcatggttactatcacttgaaacaagacaatggcgttatggccatcgtccttcctcacggggtgctcttccgtggtaatgctgaagggaccattcgtaaggctttgttggaagaaggtgccattgatacggttatcggtctgcctgctaatattttctttaacaccagtattccgacgacggttatcattctcaaaaagaaccgcaccaatcgtgatgtttattttatcgatgcctctaaggagtttgataaggggaagaaccagaacatcatgacggatgcccatattgaaaagattctcaatgcctataagagtcgtgaggatatggataagttcgcccatctggctagctttgaagagattgtggaaaatgactacaaccttaatattcctcgctatgtggatacctttgaggaagaggaagtggagccactgacagagatcgtggctaagattaatcagactaatgcgacgattgaaagtcagacagcgtcccttcttgacatgcttggccagcttcatggaacgacaccagaagcagacgaagaactcaaggcttttgtggaagcatttaaggggtagttgcaagctttcatttgctttttccgaatagatagaagtagaggggacaaccctctatttttgactaaggagaagtagatggaaaaaagacacaagcatgtctcaccaaccttggatatcatggctaagaagatttttagcctgcctgaggtgacggtggcgtttattcgagatattttggatttggatgttgtggatgctcagattttggaggggacgcagcttcataaaagggactttgatgaggatgagctcttttcaacgtcggtggatgttcgagccaagttgaatgatggaactgaggttattattgagattcaggtgcgtaagcagcattattttctcaatcgttttcattattatttggctaaccagctagtagaaaatgtgcaacaattacgccaacaagggcagacgcataagatgtatgagcagatggagccggtctatggtattgctatcttggagaagacattgttgccagatgaggagtcaccgattaatacttattggatggccaatagtcggacgggtaggcctttgaatgcttactataaggatgggaaacagcagaaccttcttcagattgcctttttagagttggataagtataataaagataagcatatcagtgatgaagggcggcagtggctagagttctttggaaatctcccattttctaaggcacctagccgagcggtcacgcatgccgattcattactggattcatccagctggacacaggaggaaaaggcgatgattgatgaacgcatacgtattcaagaaaattatgacatgaccatggaaacagcaattgatgaagcgcgtgaagaaggcatagagaaagggttagagcagggactagagcgtggacttaaacaagggttggaacgaggtcgtcatgaggagcgtttagagttgattcgtaagatgctctcaaaaggtctatctctagaagtggtatcagatgtgactggtctgtcgcttgaagaattagagggattgttatcgtaagagccaaccgataggaggaaaaggcgatgattgatgaacgcgtacgtattcaagaaaattacgacatgaccatggaaacagcaattgatgaagcgcgtgaagaaggcatagagaaagggttagagcagggactagagcgaggtcgttatgagggacaactagaaatgattcgtaagatgctctcaaaaggtctatctctagaagttgtctcagatgtgactggtctatcgcttgaagaattagagggattgttatcgtaaaatctagttaggttagttatttttttgaaaaatcagagacagattattgtctctttttttatttttgggtgtttaacatttgtaatactaaaacattcggaaaataatactttgaagcgtaaaattaaaaaagactgtcaaacgtttgacagcaatctgagaaaacaaatttaaaacattttgattgttttgcctgataactcttgctaaataagcctttatggaaatttagagttttttctttcttacacgtgaaagaaatcacctttttgtgcgacatttttagactataatttagacgtgaatgactgaactttctaatatgacaattttgttaaggccttgttaaaatggattacttagccttttattttgtgttctcatgacttataatttgttttggtttgttttggattaaagaaacaacagcatcattaagtacatcaaatatttaagagtctctgtttttagttcgagaatagcttaaaactaaaatggagagattgtgaaaaaaagtatcgggagaattaacttgtttagagaaagtaaaacaaaaccaaagtacagcatccgaaaatattccattggggcagcatcggctttgattggcttcatggcccttgccaatgggcaagcagttcaggctgacgaggcacaatcgattagtgacttgactgatgcttcaaatcaagcgcaggcccctcaagcggtttcaacagctcagttggcgacttcagagctagcatcagagagtgtgcaagcttctcagcctgccaatattatgccgtctcaacctcaggtaaggactgttcaagcagctgagcagactccgaccatcgatcaagtgattgagacaggcacctctcaaaatcaaggaacgtcagcaaatgtcttaaccaatgcgactgagggtcaaggacaaggcaaggagtataacacagatgcctacggtgccaaaatgccttacacgactcatgaagcagaaaatgcgactatcgaaaatggtgctacaattcaacagtcaacggacatggaatctacggctgtggaagcgactaaccaaacttatgttgagcttcctaaaaaggatgcggcagttactttcaatgtcactgagccagccaatgctttgaatgtccgttatacaatacctgatggtgcatcaggtcagttggatgtgcaggtcaatggttcaagcgttggtgttcttgatttgtcatctcactcagcatggcagtaccttaaaggggaccatgagtatgatcaagccattgatggttcaagtgcacgttttcgttttgatgagacacgtcttctcctaaaggatatccaattgaaatctggagataagatttctctagttaagaagaaagatgacaatgtcccttacggtattgattttattgagcttgaacaggctccagcgcctgttgcccaaggtgaaaatagtatcagtatcgtggataagggtgcatctgccaatgatgatagtgatgacactgctgccctacttgcggctgtggaagaagctaaagccagcggaaaatctgtctatattccagaaggacgtttcaattttgacaaacaggttaatatcgaagctgataatctaaaaatctcaggtgccggtgtttggcatacgcaactacactttacaagtgacaaacgctacggtggtggtattgtcttcggtcataacagtaatggcattgagttgagcaatctttatatggattctaacttgacgtctcgctataacgaagatgcacagtacaaggctatttcgggaacacttggtaaggattcgaaaattcacgacatctgggttcagcactttgaagtcggtatgtggattggagactacgaccagacggggaatatgaagtatacggacggtcttgttgttgaaaatgctcgtatccgtaataacttagctgatggtattaactttgcccaagggaccaagaattcaacagttaaaaactctaatatccgtgggaatggtgatgatggtttagctatctggtcaagtatttcagatgggacaaatgccgcagctgaggaaaataataaattcctcaataacaccattgaatcaggctggcgtgcggctggtatcggtatttttggtggtaaggggcatgaaatttcaggaaacctcatcaaggacgtttttgctggagcaggtatccgtgtaaacacggtctttgcaggtcacaattttgacctcaatgattctggaattaagattcatgacaataccattctgcgttcagggacaactaatgacctctataacctccatcgtggtgccattgatttccaacaagttcgtggaacaatcaagaatgtcgatgtctacgataataaactattgaataccttggctgatccagtgattaccaaaaactttgagatgggtgacaatggtaatggagaaatccgtttatctaataatacgattgacaataaggcgacgattgttggggctgtctcaacagtttctccaacaaaacctgaaccaaagcctgtcaataatccagtctctgagacttcagtttccgaaacgccaaagagtgagggaggttcaagcactccagtttctgaagcctcaactagtgaagtgatctcagagtcttcagtttccgaaacgccaaagagtgagggaggttcaagcactccagtttctgaagcctcaactagtgaagtgatctcagagtcttcagtttcagaaacaccaaagagtgaggtaagttcatcagccccagtttccgagatttctaacagtgaagtgatctcagagtcttcagtttcagaaacaccaaagagtgaggaaagttcaagcgccccagtttctgaaacatcaactagtgaagtagtttctgagacttcagtttcagaaacaccaaagagtgaggcaagttcatcagccccagtttccgagacttctaacagtgaagtaatctccgagacttcagtttcaggaacaccaaagagtgcggcaagttcatcagccccagtttccgagacttctaacagtgaagtgatctccgagacttcagtttcagaaacaccgaaaagtgaagcaagttcaagcactccagtttccgaagcatccaacagtgaggtgatttccgagacttcagtttcagaaacaccaaagagtgagggaagctcaactgctccagcctctgagtcaccaaagaatgaggaaacttcagtagcttcatctactagtcaggttgacgtagcaattacttctgacagcccagagaaatctccaacttcagaaagcacacaaaaggatccgattagcgaggtttcttcagaagttattgaaaaaggttcaacaagtcaggttgatgtcaaagtttctgaagctccaacaacagcacgtacatctgaagttgtcagcatcttgccaaatagtcaggtcgcttataacaatgacctaaaaacccctgtaacaagcagtcagcttgcctcagaagctattcgctttaattctcttttgaatgagaagtctgtggatgtgattgcaagtaaagttatggcggttatggcctctgaaacattagcttcagaagcggcatcacttacaagctctgaaggtgttgccaaagagattagcagtgatttgtcagaattggcggaaagcaagaaggatgacacacctaagaatgtcgcccgaattgataaagcaactgaggcaaaacaggtggccaagagttctgaaagccaagctagcacttcaaaagaaaaaggtaagtctaatacgacaacggtcttccttcttgtcggagttgctgcagcactaagtatatctacagtttatcttacaaaacaaggtaaaaaagcaggtaaataataggtaagaaacatccattaaattgggtgtttttgtttttaagcaagctctaagatacctaatatcattattctttatttttaatcatccactttgatttggtcctgtataattaaagtggtaagaaaaattaaggagttaagataatgaaagaaaaaagaaatagtaggatttgtttatttgctcttcttgttttagtatttactttaggatttggattttcagttgatactagcaaacaatctttggctgtgagctctcaagtggttcaagcggatgagaacaatggtatcttggcttttaatggtcaaaagcagtttgtcatggaggagaaggaccaactaggacgtgcccacagtgctcatatacagttacaagataaggacgagccgaagaataagcgtcccggtaaaataaaatatgatcctgtaggatggcataactataagttttattatggtgatggtaaatcaaaatcttggctaatgaatcgagggcatttgattggctatcagttttctggtgtcaatgacgagggcaagaatttagtacctatgactgcctggttgaattctggaaattataaaggaactgacgaaggtaatcagtcaggcatgctttattatgagaatcgtttggataactggctagcactccaccctaactattggttagactataaggtaacagctatctacagtggagacgagttgttgcctcgtcaagtagaacttcagtatgttggtattgatagttctggaaatctcttggaaattaaacttggtggagataaggagactcttgacagtcagggagttacgcatgttatcttggataaccaatcaccaaatgcagaaatcgattatgcagatgggacagcgacaaatacggttactgaatttactgaagcgccatctgagcctagttctgagagttcacaggtgactgaacaaccaagttctgagccagagcctgtgcaacctgcacaagaagaaagtcgaacagtttatgtggcgcgtcatggaacagcagatgtttattggtatgacatcaacagtatgcctagcaataccaacaaagcaaatgtcgttacaatgacagaggcagatgccctagcccaaggtaaacgacacacgtctaaagagtaatacaaaagctggacatcttgtccagtttttttgtaaaacgactcacattttaccactttcatctgaaaatttgatatactgagactatcaaagatacttgaaagagaggttaattgactctttttcagtacaagaaaggaataaaaatatgatttggattattattgccattatcgttgttcttgtaatttttgttattgcaagttataacggcttggttaaaagccgtatgcagactaaggaggcatggagtcaaattgatgttcagttgaaacgtcgtaatgaccttcttcctaacttgattgaaactgttaagggatatgcgaaatacgaaggttcaacgcttgaaaaagtagcagaacttcgtaatcaagtagcagctgcgacttcacctgcagaagcgatgcgtgctagtgatgaattgacacgtcaggtctctggaatctttgccgttgctgaaagttaccctgaccttaaggctagtgccaacttcagccagcttcaagaagagttgacgaacactgaaaacaaaattgcctattcacgtcaactttataacagtgtgacaagtaactacaatgtgaaattggaaacattcccaagcaatgttattgctaagatgtttagctttaaggctgctgaattccttgaaacaccagaagaagaaaaagctgtccctaaggttgatttcagtggactaggtaactaatatgttatttgatcagattgctcgaaataagagaaagacttggcttttgctcctggtctttttcctcttgttgggccttgttggttacggtgtcggctatctttggttaggttcaggcttcggtggtctgattcttgctctagttatcggttttatctatgctgttaccatgattttccaatcaaccaatgtcgttatggctatgaatggtgcacgagaggttgatgaacaaaccgctccgaacctttatcatgtggtcgaggacatggctatggtggctcaaatcccaatgccacgtgtctttattgtcaatgatccttcaatgaatgcttttgcaacgggatctagccctaaaaatgctgctgtagctgctacaacaggtcttcttgcggttatgaatcgtgaggaacttgaaggagttattggacatgaagtgagtcatattcgcaactacgatatccgaatctctaccatagcagttgccttagcatctgccattaccatgctagctgggatggctcgtaatatgatgttctggggtggaggccgtcgtagaaatgatgatgaccgtaatggaagcagcggtttggaaattattcttctcattatttccttgattgccattattcttgcgcctttggcagctaccttggttcagttggctatttcacgccagcgtgaatttttagctgatgcttctagcgtcgaattgacacgtaacccacaaggtatgattaatgctctgcttaaacttgataatagtgcgccaatgcaacatcatgtggatgatgctagcgcagccctctttatcaatgaccctaaaaaagaatctggtttgcagaagctcttttatacccaccccccaatttcagaacgggtggaacgcttgaaacaaatgtaaaaaaagtgaggctgatgacacttctaagtgtgttcatcagcctcgcttttttagtttgattcaatataaaggttgctagcaacagtttctggaatttgaatttcttttccatcaatattcaggcggtatagtagtgtaaaagggtcaaagccttcaaaggtaaaaggtgttccaattttaagaccgacagtcttcaaataatggagtagatcaatttgatcttgaactcgacgaaggacatagtctccaggagcaaggtcttgtgtaaaagtctggttgtagatttcctctatgagctgacctgatttaggaatctgcccaccgtgtggacaggttttggggtaattgagtaggcggtcaagggcattgataaagtgatcagagacagtatgctctaaaatttctgcctcttgatgaatttgatcacaagtgtattgcaagtggtccaccaaaaaggcttcgatgaggcgatgtttccgatagagttcagcaacgttgattgtacctgtttccgttaggaggtagcccttggctttatctttgatgataaggccttctgaaatcaatttcttaatcatttctgtcacagcaggtggagacacctgcatgcggttcgcaatttccttattactaattttgccttcttcagtaccaatctcatagatacatttgaggtagtcttctttattaggtgtcatttctcttcctttgaaaatagtctcatcttagtataacagatttatcagaagaatacagaacatatcttagataagatttttactgattcaagccttgggtgattttatccagattatatttcatcatgttgtagtagctgtcaccgttttgccctttttcagcaatagaatctgtaaagatctttgcatagataggaatattggtatccttagatactgttttcatagggcgttcatcgacactagattcgacaaagagagctggtacctttgtttgacgtagtttttccacgagtgttttgatttggtctggtgtgccttcttcttctgtattgatttcccagatgtaggcagatggtacgccataggcttttgagaagtatttgaagcatccttcactagtgacaatcagttttttctcatcgggaatcttgttaaatgtttctttagcttcttggtccagtttactaagtttgtcagtataggattttagattcttttcgtagtaggtcttgtttttagggtccttagcaatcagttgcttggcaatattttgagcataaataatcccattttccagattaagccaagcgtggggatcctctttacctttttctgactgaccttcaagataaatcacctcaacaccatcactaactgcaaaataatctttattttctgtcttatgagcattcttgactaacttagtaaaccaagcatttccaccagtttctaaattgataccgttgtaaaaaatcaagtcagcttgcgatgtcttctttacatcatcaggaaggggttcgtattcgtgaggatccttaccaacggggacaatactgtggagagtgattttatctccggcaatatttttggtgatatcagcaataatggaattggtcgtaacgactcgtaatttatccttgttactgccttgtttattggtacaagctgttagagtaactaccgctaaaagtagtagtactattgttgatagtatttttttcatattattttcatcctattttttattgtttagaagttttattcatgccactttgttttggggcgatgaaaaagctgatgagaaagagtagagcagacgttaatacaatgctcgaaccagctgcaatattaaaactatagccgataaaaagacctagaacagatgccagagcccccaatcctgatgagagaagaatcattgtttttaggctatgaacataaaggtaggcagtggcagccggtgtaattaaaagtgccacaataagaatagtgccaacactctgcatggcagttacagaaaccaaagttagaataaccataagtaagtagtggtagaaggtgaccttaactcccatagacttggccaaaattggatcaaaggatgttaggagtagagggcgaaagaagattgtaatagttgctagtacgagaagtgaaacgataatcgttatccacatatccatgtcttgtacagctagaatattcccgaagagaatatgaaagagatctgtggaactattagcaacaccgatgagaataataccgagagctagaaagctcgaaaaggtaatcccaattgccgtgtcactcttaataatggaattgcttttgatataggtaatcattgtagaagctaaaagtccaaagatgatggctcctatgaaaaagttaatacccaagataaaggaagtagctacgccgggtaaaaccgcatgtgaaatcgcatcacccataagcgacatgcctcttagaataataaaacaaccaacagcccctccgacaattccaataactaaagccgttataagagcattttgtaagtagtggaaatttagcaaaccatcaataaattcagaaatcatttacatctcctttataaaataaactgttaccgtaggttttacggagattatcctcattaaaaacaagattagtaggcccactagcaatcagtttacgatttaggaggataacttggtcaaaataatgaggaactttgctcaaatcatggtggacaataagaataagcttacctttgtccctaagttctctcaaggtgttcatgataatatcttcgctaacagagtcaatccctacaaagggttcatctaataaaataatatcagcctcttgtacaagacaacgagcgattagaacacgttgaaattgccctcctgataattggcttatttgtcgatgggccaaatcatttagaccaagtagtgttaaagcatctgtgaccttagaccaatcactcttagatagacgtttaaagaacttggttttgggatagagtcctagagagatgcactctctgacagtaatcggaaagttaaaatcaatatcagccttctgtgcaacataggaaatacgattcaattgctgacgaataggttgtttattgaaaaggatttttccagagtgaggaataataccaattaatgctttaattagagttgatttaccagcaccatttggtccaataatcccagtaatactaggtccctccaagtttaaggtgatattatccagagccaatgtctgttggtaagacacattaatattttcaatttgaatcattagctacctccttgagtttaatatactttaaaataaaaaataagtcaagttaacttttataattaatcaaacttaattatttactgttgtcaagatgacagaggatagtgaatgagagtacatttttatatcaaatatttagcctaatcaaactgtttgacatttgggagaggcaacaaggaatattactttcttcaatttgtacaatcttactctgtatttcaagaaatctttagtttttatttttaaaaactagtcatatttccttatttctggcataatagatgtatgaaactaacgattcaacgaatggctcgaatagccattttgtcagctctggcagtaggattgcggtcggcatttataggattgccaaatattcagcctattacagctatgttttttgtggctgttctttacttgggtttggtagatggtctcttgattatggctttaaccatgtccatctcaggattcatctttggttttggtccttgggtctttaatcagattcttgccttcggcgtcttgatggctctttggagtttgattgcacctaggttgtcacttgtttggcagattgctttggtaactctcttgtcctttctctatggggttctcatggattatagctatggcctcctatttagaagtgggattacctttgttatttctggtctgctttacgacacctatcatgcagtatcgacgcttctattctatccattcatccagtctatttttaggaggtttttgaaatgaaaaaattattgacatatatttttcttgctttatcacttgttactctagcagcctgtggaaaaaatgaggcagctaaacttactagcagcacaaataatcatcagtctaaggttcaaggtcaagtgactttgattttgaaaacagataaggaaagtaagaaaaaatcagtagaaatccaaaaaggtgatacagtgcttgatgtattggaagaggtatatcctgttcaagaaaacgatggcttcatcactgagattgatggtatttctcaagataaagataaggggatctattggatgtttgatgtcaatggtaaactaggtgaaaaagcagccaaccaacttaaggttgaagatggcgatgaaatcaaattctatcaagaaaagtataattaagattctgaactctgtttcagagtcttttttataaagttcggaaatagccttgaaaatttgtttgaaaaagtcggaaaattgcaaaataactgacgatttaaaggaaaatagtttacttttgttttaaaagtgatatgataagagggtactacataaagtaaggagaataaggtttggcttttaacaaattggaaagcagtaacaaccaggaaatcatctctgaagaagttggtatcttgaaagaattgttggatgatgcaacacgaggcatggctggagagcaaggtctcacaactattcaacatttggttgagctttatgatgaaggtgactatgtggcccttacacaagccatttcagaaatgacaaatgacgatatggtcgttgcatcacgttatttctctttgttacctcttttgattaatatctctgaagacgtggatttggcttatgaagtcaaccacaagaacaatattgatgaatcttatctaggtaagttgtctgaaacctttgatgttgtcgctgaaagtgaaaatgcacgtgacattcttgaaaatgtcaatgttgtgccagtattgacagcccacccaactcaggttcaacgtaaaaccatgcttgaattgactaatcacattcacgaacttctccgtaagcatcgtgatgttaaggctggtcttatcaacaaggataaatggtatgcagatttgcgtcgttatgtagaaatcatgatgcaaacagatatcattcgtgagaaaaaacttaaggttaaaaacgaaatcactaacgttatggagtattataactcctcattgattaaggcgattacgaacttatcgcatgaattcaaacgtttagcggttgaaaaaggtatcaaacttgacaatccaacacctattactatggggatgtggattggtggtgaccgtgacgggaacccatttgtaacagcagaaactcttaaactttctgcaacagtacaaagtgaagttatcctcaattactatatcgaaaaagttgataatctttaccgttcattctccctctcatcacgcttgactgaggtttcagatacagtagcagagatggcgaaacattctccagatacatctgtttatcgtgaaaatgaaccttaccgtcgtgctttcagttacatccagtctaagttgattcagacacttcttttctttaaagaaggaaactttagcaaggaaagagttgccaaacgtctttctgaaaatgttcgtctaggctcagcttcaacgggtgaagtagtagctgattacgtgcaacaacgtctcagccaaagtcttcaagctgtctcacaacaaacgactgaattttatgaaacagctgaggatttccatgatgatcttttggcaatcaaaaattcacttcttgaaaacgacgatgctgtcttaatttcaggtgattttgaagagcttctccaagctgtagaagtctttggtttctatcttgctacaatcgatatgcgtcaggattcaagcgttcatgaaacttgtgtggcagaattgcttaagtctgctaatattgttgataactatagtgaattgactgaggttgaaaaggttgcggttcttctcaaagaattgcaagaagatcctcgtactttgtcatcaactaatgtgcctaagtcagaaattcttgaaaaagaattggcaatcttccgtacagctcgtctcttgaaagactatattggtgaagatgtcatcaaacaacatatcatttctcacactgagagcgtttctgatatgtttgagttggctatccttcttaaagaagttggcttggttgatacagaacgtgcgcgtgtccaaatcgttccactttttgaaactatcgaagacttggaaaactctaatgatatcatgaaacaataccttggttatgatatcgttaaacgttggattaagaatagcaataactaccaagaaatcatgttgggttactcagactctaacaaagatggtggttacttgtcttcaggttggacactctacaaagctcaaaacgaattgactaagattggtgaagagcgtggtattaagattaccttcttccatggtcgtggtggtactgtcggtcgtggtggtggcccatcatacgatgccattacgtctcaaccgtttggtaccattaaagatcgtatccgtttgactgaacaaggtgaagttatcggtaataaatatggtaataaggatgctgcttactacaatcttgaaatgcttgtttcagctgctcttgaccgtatggtgacacgtcaaattgccgatccagaagaattggttgatttccgtgaggttatggacggaattgttcacgattcaaatgttatttatcgtgaccttgtctttggaaatgaacatttctacgattacttctttgaagctagtcctatcaaagaagtgtcaagtttgaatattggttctcgtccagctgctcgtaagactattactgaaatttctggtcttcgtgcgattccttgggtattctcatggtcacaaaaccgtatcatgttcccaggttggtatggtgtgggttctgcctttaatcgctttatccaagctgaagaaggcaacctcgagaaacttcaacatatgtttgaaacatggccattcttccgttcacttttgtcaaacgtagacatggtgctttcaaaatcagatatgaatatcgccttccactatgcacaattggcagaaagtgaagaagttcgtagtgtcttcaatattattttggatgagtggcagttgactaaagatgtcattcttgcgattgaaaaacatgatggcttcctagatgagagtccgtcacttaaagcaagtttggacttccgtttgccatacttcaatgtcttgaactacatccaaattgaattgattaaacgtcttcgtaacaatgatttgactgatgacgaaattagccttattcacattaccatcaatggtattgcaacaggtcttcgtaactctggttaatcaagtaaagttcatcactttagtggtgggctttttgttatgggaaaatttctgttataataggaccatgattgctatggaaacgattgaaaagctgtccaaagaaaagcttcccatgataactgtcttggctggtgaggatttagggcagtatagtcaagctaaagaaaaatttttaaaacaaattggtttcgatcccagtgacttgacctattcttattttgatatgtcagagactgattatcaagatgctgagctcgatttagaaagtatgcctttttttgcagatgagaaggtggtcatttttgatcatttcgcagatatgactactgctaaaaagtcgtatctggatgagaaagagttgaagcgtcttgaaaattatcttgagtctcctgttgaaacaactcgtcttgtcttaatgtctgcaggaaagctagatggaaagcgtcgtttagtcaaacttctcaaacgtgatgccatggtgcttgaagctagtcctttaaaagatgcagaacttagaacctattttcaaaagcaggcacatcaagaggggcttacatttgatacaggagtctttgaggaacttttgatcaagtcaaattttgatttttcagatgttcaaaaaaacttagcttttctaaagggatataaaacggaaggaaacatctcatcacaagatattgctgaggccattccgaaaagtttgcaagataacatttttgatatgacgcaacttcttatacgaggacagattcagagcgttcgtgaattggttcatgatttacggctgcagggtgaagatgagattaagttgattgctgttatgttgggacagtttcgtacctatttacaggttaaacttttatctgctcaaggtaaaagtgagcagcaaattgtttcaagtctctcagattatctagggcgtaaagttaatcagtttcaggttcgtttcgcactgagagatagccgtcccttatcagtagcattcttaaagatgacgattaagattttagtagagacagattaccagataaaaacaggaactttagataaagactacttgtttgatttagcacttttaaaaattctatcaaaccgctagaggtttagagttttctatgattttgtaagcaaaatttttgaaagctctaccactttgtggtaaagtgaagaaaaaatgaaaagaggacctttactatggcaattattcttccagaccttccttacgcatatgatgctttggaaccatacattgatgctgaaacaatgactcttcaccacgataaacaccatgcaacttatgtagcaaatgctaatgctgctcttgaaaaacacccagaaattggtgaagacattgaagcacttttggctgatgtggaacaaatcccagctgatattcgtcaagcacttattaataatggtggtggacaccttaaccacgcacttttctgggaacttttgtctcctgaaaaacaagaaccaactgctgaagtagcagctgctattaacgaagctttcggatcatttgaagccttccaagaagctttcacagcagcagcaacaactcgttttggttcaggttgggcatggcttgttgttaacgatgaaggtaaacttgaagttgtttcaactgctaaccaagacactcctatctcagacggtaagaaaccaatcttggcgcttgatgtttgggaacatgcttactacctaaactaccgtaacgtacgtccaaactacatcaaagctttctttgaaatcattaactggaataaagttgctgagctttatgcagcagctaaataagtttaaaattatcctcaataaaagaggataatttttttgtaatatgattgtaaaatctccttgctttttagtgaattatagcttaaactattattgttatgaaaaaaaagaaaaaacattcaagcaagaagtacagtggaagtcgccgaaaaactaaagataaaaagaaagattcggtaaaacaagaccttcaacaagacgtcaagaaagacactaaagatactaaaaaagatgtcaaaaaaggcgctaaaaaggccaacaaaaaagaagcgaaaaaagatacaaaaaaggtttctaaaaaatcagcagacaaaaaagtagctgaagaaacagtagtaccagttgagcacaaggaaaaagaaacaaaaactgaaaccttggcacttagaagtagacgctctaagaaatctaaatcaaaatcatctcgtgatgataaaaaagcatatattatcttagccttcctaggtgttctggtaatacttttgtttgttgctatgcttgctttagcaggacgtggtaaacaagctggtcacaccggtagccttggaaatatcttcggctctagttctaaagtcactaaaaaagaagacaaagaaaaagaggaaaaggtaactccaactaataaatcagccgaagctaaacaagcagtcatggaagcagatgcagataccatgaatggtaatggcttgtattatgactatgctaacatgacattgaaccaagtggttgaagcttttatggctgaccaaggtatcgagtctagccaaattgccttttcatataaaaataccaagacaaatgagcaattctctatgaatgatactcagccaatgactgcaggatcaacttataaattgccactaaacatgcttgtcatggatgaagttaataaaggtaaactttctttaactgaacgttttgatattactaatactgagtatgagtatcaaggcgaacatgataattatgttgctgctttcggcggttcaatgactattccagaaatgcaagagtattctcttgtttactctgagaatactccagcctatgctttggcggaacgccttggtggtatggaaaaattctatggtatgcttgataaatacggtaaatcaaaaggtgaagtgaagaccatccaaatgcatggtaataagacaacgacggattattacatccaagttttggattacctttggaaacaccaagataattacaaggatattctccactacattggtgagtcattccctaatgagtactacaagacatatcttcctaatctgacaatttatcaaaaaccaggttatgtccgtgaagcacttaacgttgatgctattgttatggaagatacaccttatatggttgcaatctatacacgttaccttggtggatcaactgaaaattcagatgaaatcagcggttggggtctccaacaattaggaatgctctcttatgttattaatgagtggcaccgtgttaatatgaactaataaagaaagccgagtttatcggcttttttctatacaattgaataaaaggtaagaagtacaatccctagaaaaagaaatgggacaaatgcgatacattccttaagatttcttcgtataaggaagtacgctagccctaataggcacgcaagctcgatagttagaagtatttttgaaaatgggaaaataagtgaggcacttgctaagtagagaaaatcaccttccccaatgtttagatgttttataaaagaaaggaaagcgaggattatccctatggcaaatgtgaggtaatagttgcccatgaataggagtgggactgttccaactatccaaatcagaagtggataggatttctgtttcaaatcaaaaatagataaacaaaggctgaagtaaagaaagtaggttacttcaagacttaaaaagtcatagaaatatagaagacatattaccccacaaaatatttccataaagaggtaacgaaaagggataggagactgacatgaacgacatcgagatcttaagaaaagttgtgagaggataggaatcatctcggaaaaacgcaactgatgcttgcaatggctacagtgactactaggaaaaataatcgagttctcaggaaaacgatcacaaactagtccgataaatgagcctaaggaggctcctagaaaaaaataaataatgcttaacatacctaattattcgaaaaagaatgagaaaaagcatttcacttgcatattatttagaaatattctaaaataaaagtgtaaataatagtaattctaaataaggagaattaatatggtagattcaattaaagaaacaatcaatgaaacagttaaccaacaagctgaaactccaacaaatacaaaaactaaagcagttttgaatcaagcagttgctgatttgtctgtagcagcttcaattgttcaccaagttcattggtatatgcgtggtcctggtttcctctatcttcatccaaaaatggatgaattgatggatagtttgaatgctcatcttgatgttattagtgaacgtttaattactatcggtggggagccatactcaactttggtagaattttcatctaactcaggcttgactgaaactactggcacatttgataaaccgatgtctgatcaaattcaattattggttgatacatacaagtatttgtcagtattgttccaagttggtttggatatcacagatgaagaaggagatgctccttcaaatgatatcttcactgcagctaaatctgaaattgataagacaatctggatgttgactgctgaacttggacaagcaccaggcttgaaataatcaaattttgagttaagatgattgtcaagagttcctctaaaagtgtataataatcgtaaaatacttttagaagaagggaggcggcgatatgtctgagcatcgacgtagtctaggcgtttatgaagatgtcctaaatcagttaaaagctaagggaattcggttgacggaatctcgtaaagctgttattcgttatttgatgatgtctgatcaacaccctagtgcagatgtgatatattatgaccttctccctgacaatcctgggatgagcttggcgacagtctataacaacctgaaggtattggttgaagaaggaattgtctctgaaattaaggttaataatgataatacaacctattatgattttatgggacatgatcacttaaatattgtttgtgaaaaatgcggtcacattaccgacttagacctaccgattccgtctttcaaggaagaggtagaatcacaaactggttttcgcattactcgtgaacagatgatattacatgggatttgcccaaactgtcaataacctgagtcttaatgacttaggttttttaagtcttgaagtatacaataatctgtaaaggttttcaaaactatcttgtcatggcagaagctttttgctaaaatattgctatgaaaactttatatgacgttcaacagttgttgaaacagtttggcatagtggtttacctagggaaaaggctctatgatatcgaaatgatgaagattgaattagaagccctctaccagaatggtttagttgacaaggacaactatcttactgctgaaatgattttacgacgtgaacatcgcattgaaatggagaaagaaaatgggtaaaaaactcttaggaattgaccttggtggaacaactgttaagtttggtattttgacttcggaaggtgaagtgcaagaaaaatgggctattgaaacaaatacgcttgaaaatggtcgccacatcgttcctaacattgtagaatctttgaaacaccgtttggaaatgtatggacttactgctgaagacttcattggcattggtatgggatctccaggtgcagttgaccgtgaaaataaaacagtaacgggtgcttttaacttgaactgggcagaaactcaagaagttggctctgtcattgaaaaagaacttggtattccattcgctattgataatgatgctaatgtggctgcactgggggaacgttgggttggtgctggtgctaacaatccagatgttgtctttgtaacattgggtacaggtgttggtggcggtgttatcgctgatggtaatttaattcatggtgttgccggtgctggtggtgaaattggtcacattattgttgaacctgaaacaggatttgaatgtacatgcggaaacaaggggtgtttggaaactgtagcttcagcaacaggtgttgtacgtttagcacgtcatttggcagaaggatacgaagggaactcttctattaaagctgctgtagataatggtgagcaagtgacaagtaaagatatcttcgtagctgctgctgaaggtgataagtttgctaatagcattgttgataaagtctctcaatacctcggacttgcaacagcaaacatttcaaacattcttaacccagattcagttgtaatcggtggtggtgtttcggcagctggtgaattcttgcgtagccgtgttgaaggatactttacacgttatgcattcccacaagttcgccgtacaacaaaagtgaaattagcagagcttggaaatgatgctggtattattggagctgctagtcttgcacttacaattgataactaatgacagaaggtgtgtctgaccaattataggtggacagcacctttttcttgttgaaaaacgtttacaatcagctgagttctgccattttgttgaaaatgtggtatactttaaaagttgaaataaaaattaaagaggaaaaaatgactaaacttagagaagatatccgtaacgtagccatcattgcccacgttgaccatggtaaaacaacacttgttgatgaattgttgaaacaatcacacactcttgatgagcgtaaagagcttgatgagcgtgcaatggactcaaacgatcttgaaaaagaacgtggaattacaattcttgccaaaaatacagccgttgcttataacggtacacgtatcaacatcatggatacaccaggtcacgcggacttcggtggagaagttgaacgtatcatgaaaatggttgatggggttgtccttgttgtcgatgcctacgaaggtacaatgcctcaaacacgttttgtgttgaaaaaagcactcgagcaaaacttgacacctatcgttgttgttaacaagattgataaaccatcagctcgtcctgaagaagttgttgatgaagttcttgaacttttcatcgagcttggtgctgatgatgatcagttggaattcccagttgtgtatgcttcagcgattaacggaacatcatcattgtcggataaccctgctgatcaagagcacactatggctccaatctttgacactattattgaccacatcccagctcctgtagataactcagatgagcctcttcaattccaagtgtcacttcttgactacaatgatttcgttggacgtatcggtattggacgtatcttccgtggaactgtaaaagttggtgaccaagttaccctttcaaaacttgacggaacaacaaagaacttccgtgttactaaacttttcggtttctttggtttggaacgtcgtgaaattgaagaagcaaaagctggtgatttgattgccatctcaggtatggaagacatcttcgttggtgaaacaattacaccaactgatgctgttgaaccattgccagttcttcgtattgacgaaccaacacttcaaatgactttcttggctaataactcaccatttgcaggtcgtgaaggtaaacacgtgacatcacgtaaggttgaagagcgtctcttggcagagttgcaaacagacgtttctcttcgtgttgatccaactgattcaccagataaatggactgtctcaggtcgtggtgaattgcacttgtcaatccttatcgaaacaatgcgtcgtgaaggatacgaacttcaagtatctcgtccagaagttatcatcaaagaaattgatggtgtgaaatgtgagccatttgaacgtgttcaaattgatactccagaagagtaccaaggttctatcatccaagccctttcagaacgtaaaggtgatatgcttgatatgcagatggttggtaacggtcaaacacgtcttatcttcctcgtaccagctcgtggacttattggattctctactgaattcttgtctatgacacgtggttacggtatcatgaaccacaccttcgaccaatacttgccagttgttgctggtgaaattggtggccgtcaccgtggtgcccttgtttctatcgatacaggtaaagcgacaacttactcaatcatgcgtatcgaagaacgtggtacaatctttgttaacccaggtactgaagtttatgaaggtatgattgttggtgaaaatgctcgtgaaaatgaccttggtgtcaatatcactacagcaaaacaaatgacaaacgtgcgttcagcaactaaggaccaaacggctgttatcaagactccacgtatcttgactcttgaagaatcacttgaattcttggatgacgatgagtacatggaagtaacgcctgaatctatccgcttgcgtaaacaaattttgaataaagcagagcgtgataaagccaataaacgtaagaaaaaagcagcagaagctgaataatatatagagaggagaagagatgttttatctgattgttgctatattgattgcatcattctatttctttattgcaccaaagtcggtaaaaaacaccatgaatcttctctttgtcatggctaccttagcattgctcctacttttagcagtgctatcaatcattaaattcttcagtttacctggtgagttctttgttacggtgggaatgcttgtattgagctatttcaccttgaaagattttttcgctatgtcagagcttaatcatgaaaaagctgaacatgaagataaataagtagcatgagattaaaagtcaatcgaatagattggctttttcttttgccaagaagaggtaactccttgaaatagcttgggataaagggtaaaatgattatgatacaatttgagagaatggacgaattatgaaatcagtaacacaatttgaaaataaaaaagttttggtccttggtttggctaaatctggtgaagcagctgcccgcctattggctaagttgggtgctattgtcacagtaaatgatgggaaaccatttgaggaaaatccatcagcacagacgcttcttgaagaagggattaaggttgtctgtggcggacatcctcttgaactattggatgaaaattttgaattaatggtgaaaaatcctggaattcgttatgacaatccaatggtagctcgtgcacttgaaaaaggcattcctgtttggactgaagtggaattagcttacctagtatctgaagcacctattatcggtattacaggctcaaatggtaagacaacaacgacaactatgattgctgatgtcctaaaccatggtggcaaatcgggtgtcttgtctggaaatatcggtttccctgcgtcagaagttgcacagtcagttactgctcaagataccttagttatggaattgtcttctttccaattgatggggattgacagcttccatccacatattgctgtgattactaacttgatgccgacacatattgactatcatggtagttttgaagaatatgtggctgctaaatggaatattcaaaatcagatgactgcggatgattttgttgttttgaacttcaatcaagatttagctaaggaattggctacacaaactaaagcacaagtagttccattctcaacagtggaaaaagtagatggtgcctatcttgaaaatggtggtctctacttcaaaggtgaattagtgatgcaagccgatgagattggcgttcctggtagtcacaatgttgaaaatgccttggcaactatagctgtagcaaaattgtcaggtatttcaaaccaagctatcaaggaaactctcgcaagctttggtggggttaagcaccgtctccaattcgttgacactatcgatgaagtgaaattctataatgatagtaagtcaacaaacattttagcgacacaaaaagcactttctggttttgataatagcaaagtcattttgattgccggtggtttggaccgtggtaatgaatttgatgaactcattcctgacattactggtcttaagaaaatggtgattttaggagaatcagctccccgtgtcaaacgtgctgctgataaagcgggcgtgacttatcttgatgccaaagatgtggcagatgcgacacgtattgcttttgatcaagcaagtgcaggagatgttgtcttgttgagccctgcaaacgcaagttgggatatgtacaagaatttcgaagtgcgtggtgacgaatttatcacaactgttgagcaattgaagggatagtctatggcaaaagcgaaaaagattgtttttaccggtggtggaaccgttggacatgtgactttaaatcttatcttaattccaaaatttctcaaagatggatgggaagtgcactatatcggtgacaagcacgggattgaacatgagcagattgataaatctggcttagatgtgactttccatagtattgctacaggtaaactacgtcgttatttctcatggcaaaatatgttggatgtctttaaagttggttgggggattctacagtctattgcaattattgccaagattcacccccaagcactcttttcaaagggtggatttgtctcagtgccaccggtaattgcttctaaattattaggagttcctgtatatgtgcatgagtctgacctttctatgggcttggccaataaaattgcctataaatttgcgactactatgtttacgacttttgaacaatcaaaaggattggcaaagacaaaacatgtaggtgctattacaaaggtaggaatggcgacatctaatcagtctggtgcccttgataagattaaagaacagtttgatgacaacttaaaaactgtccttttcattggtggttcagctggtgcaaaggtatttaatgattttattagtaatactccacagctgactgaaaaatataatgtcattaatatttctggggactcttcattgaataccttagaacgtcatctttatagagttgattatgtgacagatttgtaccaacctcttatggatacggcagatttagttgtaactcgtggtggctcaaatacgattttcgaattgttggctatgaaaaaacttcatttaattattcctttagggaaagaagctagccgaggagaccaacttgaaaatgctgcctattttgaacgaaaaggctacgcacgtcaattacaggaaacagaattaagttgggaaaccttgaatcatgagcttgaacaacttgttgaacatgcagagacttacaaagaagcgatggctaaatctgaggaaatcacttctcctgatgatttttataacctattagtgactagtatttcaaaaaaataaaggaatttcatggcaaaaaaggatcaagaatcacaagaaaaacaagttctcacagagtggcagaagagaaatctcgaatttttgagaaaaaaagaaaccgaagattctgaagaatttgcgaatggaaaggtcgttcattcacaagaagcgacttcaaatgagagccagccaccagtgaaaaagaaggttaaaaagaaaaaaaagaccaaaaggaagaaacgaaaaaaaggtaatacaactagtaatattccaattgcacaacaaaatcttgcaggactagttgtttttatcgctgcactcctaatcgtattttcacttttctttatttcaccttggtcaaaacaaaaggttctcactgtatcaggaacaaaaaatgctttaccagaagatgtgaaagttgcaagtggtattcttgatacagactatatcactcatgtctttttcaaccaaggaaaggttgcatcaactgttgaaaaaactaatgtttgggttaaaaaggctacagttacatatagttttccaaatcaatttaatattgcagtaaaagaatacccaatcgtggcttatcgtcaaactacaaatggttatgtttctattcttcaaagtggtaagacaggaggaacagtttcaactagtaatctacctgataaattcatcaccttaaagatggatgacgagaagaaaatcgaagagttagtaaaagaattaaataaacttgatacaaaaatcaagaataatattcaaattattaatcttacgcctactaaagcaacttcagatttactaacgattgagctgtatgatggcaattccattcgtgttccactttctcaattaacagttaagcttccttactacgagaaaattaagagtcaactttcagatggaagtattgtagatatggaagttggactttatacaacgactcctgaagttgaatcatcaaaaactgatggggataaaaagaaagataaagataagactgataaaaaagaagaaaatgcaacttctgaagaaggtcaagatactacaacatcaacggaacagcattctgaagaagaaactaattctgaaaattcaggtattcaaacagaagaaaatccaccagttggtcaggaaacaattcatcggacttcccctgctcaaggctaatattgaataataaaaaacgtaaaatgctgacattttacgtttttttatggtacaatagtatccgaataattctgtttttatacagtttacaaagatattgaatggaaagattgagaggtcgagtgaatggctagagatggcttttttacaggattagatataggaactagctcgattaaggttcttgttgctgagtttattgatggatcaatgaatgtcatcggagtaagtaatgttaagagttctggtgtgaaagatggcatcattgttgacattgacgctgcagcgaaatcaatcaaaacagctattgaacaagcagaagaaaaagctgggattgttattgagcaagtgaacgttgggcttccagctaatcttcttcaaattgagcctacacaaggtatgattcctgtaacaagtgaatcaaaagaaatcaaagatgaagatgttgaaagtgttgttcgctcagccttgacaaagagcattacacctgagcgtgaggttatctcactagttcctgaagagtttattgttgatggcttccaaggaattcgtgatcctcgtggaatgatggggattcgtcttgaaatgagaggtctcatatacacaggtccaacaacaattcttcacaaccttcgtaagacagttgaacgtgctggtattcaagtagagaatattatcatctctcctcttgcaatgacacgtgctgttctaaatgaaggtgaacgtgagtttggtgctactgttattgatatgggtggcggtcaaacaactgttgcaagcatgcgtgctcaagaacttcaatttaccaatatttattctgaaggtggcgagtacatcactaaggatatttcaaaagttttgaagacttcaatgcagattgctgaagcacttaagttcaattttggtaatgcagatattgaagaagcaagcgaaacagaaactgtccaagtagaagttgtaggtgagaattcaccagttgagattacagaaaaataccttgctgagattatctcagctcgtgtgaagcatatccttgatagagttaaacaagacttgactcgaggacgtctacttgatttgcctggtggcattgtccttgtaggtggaacagctatcatgccaggtgtggttgaagttgctcaagaaatttttgagacaaatgttaaactttacgtgccaaatcaagttggtatccgtaatccaatgtttgcaaatgtgattagtcttgttgagtatgttggtcttcttacagaagttgatatcattgcacaacaggctgtgtctggtgaagagtatcttcgtcgtaaaccaatcgacaatgaggctcctgccttgagttttgatagaactcctgctccagcacctcgagtggctcctcagccaagtcctgttccagttgagaacaccattgaggtacctctgccagttgaagaagaaaatcatgaacaaaaacaaaaacttggtgatcgtgttcgtggtattttcggcagtatgtttgattaattgaatctagtaaaagcgaggaaataaaatgagtttttcatttgatagcgcatcagttcaaggtgcggtaattaaagttatcggtgtcggtggaggtggcggaaacgccatcaaccgaatgattgaagaaggtcttgctggtgttgaatttattgcagctaatactgatattcaagcactcagctcttctaaagcagaaacagttatccaattgggtcctaaattgactcgtggccttggtgccggaggtcaacctgaagttggtcgtaaggcagctgaagaaagtgaagaaacacttacagaagcacttacaggagctgatatggtctttatcactgctggtatgggtggtggctctggtacaggggcagcaccagttattgcacgtattgcgaaaagcttgggtgcattgacagttgcagttgtgacacgtccatttggatttgaaggtaacaaacgtggtgccttcgctgtcgaaggtattcaagaattgcgtgagcaagttgatacccttcttattatctctaacaataaccttcttgaaatcgttgataagaaaacaccacttcttgaagctcttagtgaagcagataatgttcttcgtcaaggggtccaaggtattacggaccttatcactaacccaggtttgatcaacctcgactttgccgatgtgaaaacagttatggcaaataaaggtaatgcacttatgggtattggtattggttcaggtgaagaacgtattgttgaagctgcgcgcaaagcaatctattcaccacttcttgaaactactattgatggtgcagaagatgttatcgttaacgtaactggtggtcttgatatgacgcttacagaagcagaagaagcatctgaaattgttggtcaagcagctggtagcggtgttaacatttggcttggtacatcaatcgatgatacattgaaagatgaaatccgtgtaactgttgttgcaactggagttcgtcaagatcgtgctgaaaaagtatctggtatgaaagctcagccacgtaaagtgactacagctccttcacaaccatcagctcctgctcaacaagttgttcaagaagagcaacgtccagtttctcaaccttcatttgaacgtcaaccaaattttgactataatgaaacaccttcaatgcctcaagcaggagttcgtcctgcagcggcagctcctcaacaagagcagtcagcttttggtaattgggatttgagacgtgataatatttctcgtcctgaaactggtcaactagatagtcaattgactatgtctacattctcaagtgatgttgaagatgatgatgaattggagacaccaccattctttaaaaatcgttaataatgactatagaagagaataaaaataatgtttatcaagcggtaaaaagagcttgtgaaaatgctaatcgctctagcgatgacgtcaatattgttgccgtaaccaaatatgtttcaagtgatgtcgctgaagaattggttaaaacgggaatcaagcacattgctgaaaatcgcgttgataaattcttagataagtatcaagctttaaaaaattatgatttgacttggcaccttattggtaccctgcaacgtcgtaaagtaaaggatgttattaatttagttgattattttcatgctttggattctgttaaattggcagaggaaattcaaaagcgtgccgaccacaccattaattgcttcctacaagttaacgtttcaggtgaagagtcaaaacatggtttttcacctgaagaacttgatactgttctaaaacaaattgaaaatcttgataagatttgtatagttggactcatgactatggctccaattgatgcagatgctcaagaacttgataagatttttgctgagacaaatgaacttagacaatcaattcaagagaaaaaactaaagaatgttccttgtgatcagttaagcatggggatgagtcgagactatgacatggctattcagaatggatcaacctttgtcagaataggcagtgcattctttaaagagaacggagaataaccttatggcattaaaagacgcaattgataaaattgtttcatattttgataccgacgaagtaacagattatgaagatgctgctaaagaagaggctaaagaacgtccagtgaaagcacagaaacctgtgcagacacaacctcctcgtcagcaacgtcaacctgagcgttctcaggcaacagtccctcctcgtcgccaacatgttcattcagacttacaggaaactcaagtccttcgtagtttacctctgagtcgttcacaagcaaatcagggaccacaacaaatgaatacaactaaaacaacaattgcaattaaatatcctaaaaagtatgaagatgctcaggaaattgtagaactattgattgaaaacgaatgtgttttaatcgattttcaatatatgttggaagcgcaagctcgtcgttgtcttgactttattgatggtgctagcaaggtacttacaggcaacttacaaaaagttggctcttcaatgtatttgcttacgccaattaatgtcgttgttgacatcgaagagattgggttggcacatggcaaccaagaagctaattttgacttcgacatgaagagacgttaagcgatgtcagtattactttatgttatttgggcacgtgttgttaacgtgatagagattcttcttgtagtctatgctttgttgtcctggtttccaggagcttatgatactagccttggaagaatcattagacaaattgttcaaccgattctcgcaccatttcgtcgcctgaatttatcttttgctggtattgatttttcaatattggtaattgtacttctactaaacttttcacttagaattcttagatttattctactctgatgtcagatattaaaaatattgaacaacattactcgttagatgaacgtccttttctagagaaggttaggggattttgtcaattagttgatgataggtacagtccttacttaactgatttcttgaatcctcgtgaaattcagattgttgaagagttagctcattactacaatttaaaattttttgtgagttctactcttgaatctgaagagtatggaagagttattcttgctcccgaatattacgagcttgatgacgatgactttgaaattaaacgactagaaatctcttatgcgagacagttcaataaattgacacacccaaaagttttgggagcactgattaatcaacttggtcttgaccgtcaagtatttggagatattattcttgatgaagaaggacgcgttcaattttccattgcttctcatttagcaagttatgcgataatgactatcactaagattggtaatgtttcggttactctaaaagaagtaagtaaagacgattggatttcaaatcaagaaaattattcacaatcttttgtcttactttccagtatgcgtcttgataatgtgttggcaacggtattaaacctatcccgttctaacgccttaaaacttattgcttctggaaaagttaaattaaattatagacaaattgagaaggctaatcagacggttatgattggtgatatggtttcggttagagggtacggtcgatttcgactagctcaacaagacggattttcaaagtccgggaaagctaaaatcgttattgaaagtctgttaagacggagaaaaaagtagttatttaatttaaaccatcagatatggtaatgaaaaataaaggaggcctgtaatggctattacagcacttgatattaaagataaacagtttacaactaaatttcgtggatataatgagcaagaagttgatgaatttcttgatattattgtagatgattacgaagatttggttcgtgacaatcgtgaacttgctgctcgtgtaaaagagcttgaagaaaaattggcttattttgatgaaatgaaagaatcattgagtcaatcagttattttggctcaagaaacagctgaaaaagttaaagcttcagcggctgatgaatcagctaacttgattaataaggctaacttcaatgctactcatttggttgaagaagctaaatctaaggcatctgaaattcttcgtgatgcaacagatgaagccaaacgtgttgctatcgaaacagaagaacttaagcgtcaaagtcgtgtcttccaccaacgcctattggctgcagttgaaggtcagcttagcttggcaagtgctccagaatggggtgaattgttgcaaccaacagctatttatcttcaaaattcagatgctgcctttaaagaagttgttgaaaaagttttggatgaacatgtacctgattcaaatgatgcagcttcatttgatgcaactcgtcaattcactcctgatgaaatggctgaacttcaacgtcgtgttgctgaaagtaataaacaagttgaagatttctctagtccagaagttgatgaaacaaacgaagttgtttcaactccagttgattttggtattccagacactttcgagagtgaagtagcagatttcccaacttcagcaccagtagatgaagattttgatttgcaacctgagtcaacaggtgaaattaatcttaacgaaacacaaacgtttaaattgaatattagcgaataagaaaaatacaacttaccaagtatattaacagcgagtgggagatggtgtgagtcccatattccctatttggatagttatcattttcaagcattctaactgaactaagtaagttagaaggatggtcctccttacggacatatgagggagcaaatgttttttgctctgaattaaggtggtaccacgagctttcgtcctttttgatgaaggctctttttatttagtatattaatttaaagaggagatataatgaaactcaaagaaaccttaaatctaggtaagacagcttttccaatgcgagctggacttcctaacaaagaaccaatctggcaaaaagagtgggaagatgctaagatgtatcaacgtcgtcaagagttgaaccaaggtaaacctcacttcactcttcatgatggtcctccgtatgccaatggtaatattcacgttggacatgcgatgaataaaatttctaaggatatcattgttcgttcaaaatcaatgtctggtttctatgctccttacgttcctggttgggatacgcatggtcttccaattgaacaagtattggcaaaacaaggtgtgaaacgtaaagaacttgatcgtgctgaataccttaagatgtgtcgtgattatgcactttcacaagttgacaaacaacgtgaagatttcaaacgtcttggtgtttcggctgattgggataacccatatgttactttgacaccagactatgaggctgcacaaatccgtgtctttggtgagatggctaaaaaaggttacatctatcaaggtgcaaaaccagtttattggtcatggtcatcagaatcagcacttgctgaagctgaaatcgagtaccatgatttagtttcaacttccctttactatgccaataaggttaaggatggtaaaggagtgctagacacagatacatatatcgtagtttggacaacaacaccatttacagtaacagcttcacgtggtttgactgttggtgctgatattgaatacgttctcgtaaaacctgctggagaagaccgcaaatttgtcgttgcttctgaattacttaatagtctttctgagaaatttggttggactgatgtggaagtacttcagtcataccgtggagaagaattgaatcaaatcgtcactgaacacccatgggatacagaagttgatgagcttgttatccttggtgatcacgtaactacagattcaggtacaggtatcgtccatacggctcctggttttggtgaggatgactataacgtaggtatcgctaatggccttgaagttgccgtaaccgttaatgagcgtggtactatgatggaaaatgctggtcctgattttgaaggtcagttctacgataaagtggctccaattgttatggaaaaactcggtgatttgctccttgctaaagaagaaatctcacactcatacccatttgactggcgtacgaagaaaccaatcatctggcgtgccgtaccacaatggtttgcttctgtttctaaattccgtcaagagattttggatgagattgaaaaagttaaattccattctgagtggggtaaagttcgtctctacaacatgattcgtgaccgtggtgactgggtaatctctcgtcagcgtgcttggggtgtgccactcccaatcttctatgctgaagataaaacaccaatcatggctgaagaaacaatcgaacatgtggccaaacttttcgaagagcacggttcagttatttggtgggaacgtgatgccaaagatcttcttccagaaggttttacacatcctggctcaccaaacggcgagtttactaaagaaactgacattatggacgtatggtttgactcaggctcatcatggaacggtgttgttgttaaccgtcctgagttaacttatccagctgacctctatctcgaaggttcagaccaataccgtggatggtttaattcatctcttattacatctgttgccaaccatggtgttgcaccatataagcaactcttgtctcaaggttttgcgcttgatggtaagggtgagaagatgtctaaatcgcttggtaacacaattgctcctagtgatgttgagaaacaatttggtgctgaaattcttcgtctttgggtaacaagtgttgatacaactaatgacgttcgtatctcaatggatatccttagccaagtatcagaatcttatcgtaagattcgtaatacacttcgtttcttgattgccaatacctctgacttcaatccaacaactgatgctgtagcctttgaagacttgcgttctgtagatcagtacatgactattcgatttaaccaattggttaagactattcgtgatgcctatgcaaactttgagttcttgactatctacaaagccttggttaactttattaacgttgagttatctgcattctatcttgattttgccaaagatgtggtttatattgagagtgcggaatcacttgaacgtcgtcaaatgcaaacagtcttctacgatattcttgtcaagattacaaaactattgacaccaatccttcctcacactgcagaagaaatttggtcatatcttgaatttgaaacagaagactatgttcaattgtcagagttgccagaagcagaagattttgtgggtcaagatgcacttcttgaaagatggaatgccttcatggatttccgtggccaagctcaaaaagctttggaagaagctcgtaatgaaaaagttattggtaaatcgcttgaagctcatttgactatctatcctgatgatgaagtcaaagaacttattgaaggtttgaacactaaccttgctcaacttttgattgtttcagcattgactattgctgaaggagaagcacctgaatctgctgtaagctttgaaggcgtggcattcacagtagaacgtgctacaggtgatgtctgtgaccgttgtcgtcgtatcgatccaactactaaagaacgtagctacaacgcgactatctgtgatcactgtgctagcattgttgaagaaaactttgctgaaggtgtagcagaaggttttgaagtaaaagcaaaataaaataaaaagagttcaccgtgaactcttttttctatttgtttttcgaatatagtattgaacacaataaaaaactagctaagctagttttttattatagtccgtagttataatcatcgtcttgcatggcttcgacagttcctagaaggtaaccattaccaacttgagagaagaagtcgtggttagatgttcctgtagaaataccattcataacgattgggttaacatcgttcgcactatctgggaagagtggatcttgtcccaggttcataagagccttgttggcattgtaacgaaggaaagtcataacttcctcagtccatccaacaccgtcataaagagatttagtgtagagctcttcattttcatacaattgatagaggagatcatacatccattcacggaaactttcttgctcttcttcaggcaattcgttgaatccaagttggaatttatagccaatataggttccgtgaacagattcgtcacggataatgagcttgataatttcagcgacgttagctagcttgttattaccaagataatagagtggagtgaagaaccctgaatagaaaaggaaagtttcaagatatgttgaagcaacctttttctgaagaggcgttccattttcatagatatcgttaatgattttcgccttggtttggaggtatttgttactgttagtccactcgaaaatttcttcaatttcagatttagtattcaaagttgagaagattgaagagtaagatttggcgtgaacagactccatgaactgaatgttgttcaatacagcttcttcatgaggtgtacggacgtctgcacgaatggcttcaacacccgtttgagattgcatggtatctagcaatgttaaaccaccgaaaacttttccaaccaaatctttttcttcagcggaaagtttacgccagtcatcaaggtcatttgaaagtgggatacgtgtatctagccaaaattgctcggtcaatttttcccaggtagatttatcaatcgcatcttcgatttcattccagttaatggctttgtagtaagtttccattagaaacctctttctttattgatatcgttactattttatcataattcaaaatcatgatatagttttttgagttgatctattaaaaaagtcggcgaaccgaccttttaatgcattttgtaaataagagtagtgaagttgctatcgttaaatcactatcttaaatgacacagctttcacattggttagaaccaacctcttccccatcatctgtataagtacggatgtagtagattgatttaattcctttattaaaggcgtagttacgaaggatagaaaggtcacgagttgtttgtttattttctgttttccattcgtaaatttcttttggtaactcactacgcaagaatagggttaatgacaaaccttgatcaacgtgttcagtcgcagcggcatagacgtcgataactttacgcatgtccatgtcgtaggctgaagtgtagaaaggaattgtgtctgttgaaagaccgttggccggatagtaaatttttccgattttcttttcttgacgttcttcaatacgttgtgtgattggatggatagaagcagaacagtcattaatataagagattgagccatttggtgcaacagccaaacggttttgatggtagagtccatctttcttaacgagttcacgtagttcttcccaatcttttgcttgtgggatgaagtgaccatcgaaaagttctttgatacggtcagatttaggaacgtattggcctgtaacgtatttatcaaagtaagaaccatcagcatattttgatttttcaaaaccgacaaaggtttcttgacgttcgcgggcaatattgttagattcaaccaaagtccagtagttcataagcatgaagtagatattagtgaattcaacagattcggggctaccatactcgatatggtgtttagcaaggtaagagtgaagccccatagctcctaaaccaaaggtatgagcttgttggttaccatttttgatggatggtacagcatcaatacttgaactatctgtaacaaaggtaagtgcacgtgtcatagccttaatcgaacgtccgaagtcaggagatgtcatcatgttaaggatattagttgatccaaggttacatgaaatatctgtaccgagtttgacaaactcttgtgcatcgttaagttcacttggtgtttgaacttggagaatttcagaacagaggttggacatgacgatcttaccatcaattgggttgtgtcgattggctgtatcaacattgacaatatatggataacctgattcttgttggagtttagaaatttcagtttctagctcacgtgcattaatcttggtttttgtaatattgggattggcaaccaactcatcatacatagctgtaatatcaatgtagttatatggtttaccatactctttttcgactgagtaagggctgaagaggtacatatcttcattattacgtgccaactcgtagaatttatctggaactgtaacaccaagtgacagtgttttaacacgcaccttctcatcagcattctctttcttagtagaaaggaaggcaaggatatctgggtggaaaacatccaggtaaacaacaccagcaccttgacgttggccaagttggtttgagtaagagaagctatcttcgaaaagcttcataacaggtacgacaccagaggctgccccagcgtatcctttgataggagcaccagcttcacgtaggttggataggctaatacctaccccaccaccaatacgtgataactggagggccgagttgatagaacgtccgatagaattcatgtcatccgttacttgaataaggaaacatgacacgagttctccacgacgactgcgtccagcatttaaaaatgaaggtgtagcaggttgataacgttggtgaatcatttcgttagcaaggtcactagcaaggttttcatcaccatcagcaaagtaaagggcgttgaatagaacacgatcttcaatgctttcgaggtaagactcgccatcgtttgttttgagggcatattgttggtagaacttgtaggctgccatgaaagattggaagcggaatttttgagaatgaatttctgcagacaatttttcgatgaaagcaggttcgtatttaccgatgaattcagactcgatataatcgttctcaatcaaataattaattttatctgtgatgctgttgaatgccattgaatttggcttaacgttttcaaggaagaaggcacgaagtgcttctttgtccttatgcaaaggaatttgaccgttaacaggacggttaatttcgttgttgaggcggaagtatgagacatcgccaagattttttaaagacataatacagataccaggctcagtttaatagtatattaaggttaaaacattaaactaagcaaacaagttcctttctatttaaaaacttgataattaaaggatttctttaagtttagtcggttgaaaacctgaaaaaacgatatcgcctgcttcaataactggagcagcagtgaaaccaagactttttacgtaatcgattttttctggctgttcatcaatgttgatttcttcgaaatcagcaccttccttttccaggaattttttagtcattttgcactgcatgcagttgtttttagaaaacaatgtaatctttgccattgcaaatactcctttataaaaagattttaagtggccaagagagccactttttaactttatatagaatacccaaaatattgggaaaaatcaagaggttgaaccgacaaaatacaatattttgtgtttagtattgaaacacaaccctatatcttgtgttttaaaggcttttttaagtttcctaaattaaataggatttgtttatggaattgactaaaaaagaaatatctcacctctgatgttatataatataacatcaaaatgccaattctatttgttttttcaaaaaaaacagtgtagaataaagaaaatttttaactaatggaggttcaagtatgcaagaatactgttcaaatctaactgtaaatggtaagacattctctttctatgatctcgaaaaagcagcaaaatctcatgatgttaaggtcggagagctaccttataccattcgaataatacttgaaagtctcctccgaaaaaaagatggcgaggatgttaaggaatctcacatttctgatctaatgaaatttccgaattttccaacaatttctgaagtgccttttaaaccaagtcgtgttatcttacaagattttacaggagttcctgttgttgttgatttagcttcaatgcgtgatgctatagtggctaatggtggtaaagccgaatttattaatcccgagattccagtagatttggtcatcgaccactctgtccaagtggattcatacggatgtgatactgctcttgaagataatatcaatctagagtttaaacgtaataacgagcgctatgaatttcttaagtgggctgaaaagtcttttgaaaattatcgtgcggttccaccagctacaggtattattcaccaggttaatattgaatttttgagtgatgtcattattgaaaatgatgggctcctatatcctgactctatgtttggtacagatagtcacacgactatgattaatggtattggcgtccttggttggggcgttggcggaattgaagctgaagcagcgatgctcggtgaagcatcttattttccaattccagaggttattggtgtacatttgacaggagagttgcctaaaattgcaacggcaacagatttggctctcaagattactcaggtgcttcgttctgaaaatgtggttggtaaatttgttgagtactttggacctggcttgaagagtttgtctctagctgaccgtgccacagtcgctaatatggcaccagaatatggtgcgacctgtggttattttcctattgatgacgagactcttaactacatgcgtttaactaaccgtgatgaggatcatatccaagtcactgaagcctatacaaaagccaatcatcttttctatgatccaagtaaagaagccaagtatactaagattgttgaaatcgatttgtcatctattaaaccttctatctcaggtcctaaacgtccacaagatttgattctcttatcagatgctaagcaagaattccaggatgcagtggtacgagaagcaggtgtccgtggtttcggtttggataaggaagagttagtaaaaactgcaaacgttgactttgaggatcattcagaaacaattcaaacaggtcatgtggccattgcagctatcacatcatgtaccaatacttcaaatccttacgttcttatggcagccggtcttttagctaaaaaagcggttgagaaaggattaaaagtctctccaacagtgaagacatctttggcacccggttctaaggttgttactggttatctcaaagcttcaggcttgcaaacctatctagataagcttggctttaacttggtaggttacggttgcacaacctgtattgggaactcaggagacttacgtcctgaggtggctaaggctattgtagacactgatttattagcgagtgctgttttgtcaggaaatcgtaattttgaagggcgtattaatccacttgttaaagcgaatttcttggctagcccaccattggttgttgcttatgccttagctggtaacacgaatattgatttgacaactgaacctttaggttttgacgacaatggtcaagctgtttatttagaggatgttatgccatctcgtgatgaaattgagacttatgttgataaatacgtcacccgtcaactcttccaagatgaatatgccagtgtcttttctgatagtgagaagtggaatgccattcctactgaacaaagtcaaaattataaatggaatcaaaactctacctatattcaaaacccgccttactttgatgctttaggagatgatttgagcattaaaccattgaaagatttgaaggttttggctaaatttggagatacggttacaacagaccatatttctccggcaggtaatattgccagaaatagtccagcagctcgttatttgactgagaatggtgttgattatcaagaatttaattcttatggtagccgtcgtggtaatcatgaagtcatgatgcgaggaacctttgctaatattcgtatcaagaatgagctagcagatggaaaaattggtggatatactaaatatgatggtgacattctacctatatatgatgctgctatgaaatataaagaagctaatcaagatacgcttgtaattgccggtaaggattatggtatgggctcaagtcgtgactgggcggctaaaggtgctaatcttcttggtgtaaaagtagtgcttgctgagagttttgagcgtatccaccgttcaaatctcgttatgatggggattttaccagtccaatttatggaaggagaaaatgctgaaagtcttggattgacaggacaggagacctttagctttgacctttcagaaaatccaggtgtccatgatgttatcactgttacagcttcaacacctgaacaaaccaaaacctttaaagccttggtacgcttcgatgcagatgctgacattcgctactataaaaatggtggtatcttgccaatggttgtaagaaaaaaattgaagggggcctaatatgacaacagttgaaattaatggacttaaggatatgattgcctgtaatactaggatttcatctattatcgatgatcatttatcgtattcgggatatgatatttctgagtttatggaaaataaagcgtcttttgaggaagtgatttatctcttgtggaatggtcatcttcctacgcaaatggaacttaagtattttgaagctgagttgcgtaagaactatgatatttctgatgctgtagaacaatgcattcttatccagtctcgtccacatttgcacccaatgagtgtgttacgttcaacagtctcccttcttggagtttacaatgttgacgccgaggaaagatccatggaggcaatttatcagcaaagtattgaattgatggctaaattgcctacaattattacgacttttgcacgcttacgtactggtaaaatgcctctcaaaccaagagaagatttaggttttgcagctaattttctctacatgctgaatggtgttgaaccttctgaaattgaaattgaagctatgaataaggcattaattctacatgctgaccatgagttgaatgcttcaacttttgcagcgcgtgtttgtgcctcgactctgacagatatctattcttgtgtcacaacagctattggagctctaaaaggtcccctgcatggtggagctaatgaacgcgtctttgatatgcttaaagaaatccgtgaatctggtgatgttaatgcttacttgcaggaaaaacttgattctaaagaaaaaatcatgggatttggacaccgtgtatacaagaaacaggatcctcgtgaaattttcttaagagatatggctaaaaagttgacagagggtactgagaatgaagaattctttaatatgtctcaagaaattgaagaattcatgaaagataagaagggattgattcccaatgtggacttctattcagccaccgtataccatactctaggaattgacagcgatatcttcacccttatctttgctatgagtcgtgttgccggctggattgctcatattcaagagcagcaaaaaaataataaattgattcgtccacgctcgcagtacatcggacaagaaaatatgacgtatattcctttagaaaaacgctagggaggaaagctatatggcagaaaaaatcgtaatgaaaaatggacagcttcaagtttctgatcgtccaattatcccttttattgaaggagatggtgttggacatgatatctggaagaatgcccaagcaatctttgataaagcagtagaagtagcctatgaaggaaagcgtcatattgagtggcaagagcttttagccggtaagaaggcttatgacaaaacaggtgaatggttgccgaaagaaaccttggaggctattcgagaaagtttagtagctattaagggaccgcttgagacgccagtaggtggtggtattcgttctttaaatgtagctttacgtcaagaacttgatctctacgcttgtgttagacctgttcgttactttgacggagtagcaagtccgcttaaggaaccagaaaaaacgaatattactatttttcgtgaaaatactgaagatatttatgcgggaattgaatgggaagcgggaacagcagatgttaagcgcgtgattgagtttctccagacagaaatgaatgttagtaaaattcgcttcccagaatcaagtagtatcggaatcaagccgatttcaatagaaggaagtaaacgtctcattcgctcggctattgactatgctctcaagaacaatctaaaaaaagtgaccttggttcataagggaaatattcaaaaatttacagaaggtggcttccgtaaatggggttatgaagtggctcaggaagaatataaagaagaattgctggctggtcgtttagagattaatgatataatcgcggataactttctacaacagattcttttaaatccagaaaaatttgatgttgttgccttaaccaacttgaatggtgattatgccagtgacgccttagctgcacaagttggtggtatcggcatctcccctggagccaatattaactatcaaacaggtcatgctatttttgaagcaacacatggaacagctccggatatcgcggatcaagataaggctaatccttgctcagttctattatctggctgcatgcttctagattatattggttggactgaggcagctcaactgattacaagtgctattgaaaagacatttaaagctgatatctttacagctgacttggcatttgggaaacaagcttattcaacgagtgcctttagcaatcaaattctttcaattatgtgattgtttttgctcgaaaatgaaaattaacgattgaaaacaccatgaaagaaattttctgaaaatgttgtaaataactagagactagtatttgcttatgttttgaaaaatgaaaatgagcagtaaaatgagagacaagctttcgaaaaacttgtagaaagtacgttttaaccttgataatctcaattagctatgttataattctaaattgtaagggttatcattgataactcaaatattccaaactaagaaggagaatccattatggcttctaaagatttccacattgttgcagaaacaggtatccacgcacgtccagctactttgcttgttcaaacagctagcaaatttgcttcagatatcactcttgactacaaaggtaaagcagttaaccttaaatcaatcatgggtgttatgagccttggtgttggtcaaggtgctgacgtaactatctctgcagaaggtgctgatgctgatgatgcaatcgcagcaatcgcagaaacaatgacaaaagaaggattggcataagaatatgacagaaatgcttaaaggaatcgcagcatctgatggtgttgcagttgctaaggcatatctgcttgttcaaccggacttgtcatttgaaactgtaacagttgaagatacaagtgcagaagaggctcgtctagatgctgctctagcggcgtcacaagacgagctttctgttatccgtgaaaaagcagttgaaagccttggtgaagaagcggcagccgtttttgatgctcacttgatggttcttgctgacccagaaatgactggtcaaattaaagaaactattcgtgctaaacaagttaatgctgaagctgctttgacagaagtaacagacatgtttatcgctatttttgaaggtatggaagataacccatacatgcaagaacgtgcagcggatattcgtgacgttacaaaacgtgtgcttgctaacttgcttggtaagaaattgcctaacccggcaacaatcaacgaagaatcaatcgttgttgctcatgacttgacaccatctgatacagctcagttgaacaaaaagtacgtaaaagcctttgttactaacatcggtggacgtacaagtcactcagctatcatggcgcgtacacttgaaatcgcagccgttcttggaacaaataacatcacagaacttgtcaaagatggtgatgttttggctgtttcaggtattactggtgaagttgttatcaacccaactgaagagcaaattgctgagttcaaagcagctggtgaagcttacgctaaacaaaaagctgaatgggctctccttaaaaatgctcaaacagttactgctgatggaaaacatttcgaattggctgctaacatcggtacacctaaagacgttgaaggtgtaaatgataacggtgcagaagctgttggtctctatcgtacagaattcttgtatatggattctcaagacttcccaactgaagatgaccaatatgaagcttacaaagcagttcttgaaggtatgaacggtaaacctgttgtcgttcgtacaatggatatcggtggggataaagaactcccttacttcgaccttcctaaagaaatgaacccattcttgggttaccgtgctttgcgtatttctatctctgaaactggtaatcaaatgttccgtacacaattgcgtgctttgcttcgtgcatctgttcacggtaaattgcgtatcatgttcccaatggttgctttgttgacggagttccgtactgctaaaggtattcttgaagaagaaaaagctaaattggttgctgaaggtgttgccgttgcagacgatatcgaagtaggtatcatgattgaaatcccagctgcagctatgcttgctgaccaatttgctaaggaagttgatttcttctcaattggtacaaatgaccttatccaatacacaatggctgctgaccgtatgaacgaacaagtttcatatctttaccaaccatataacccttcaatccttcgtttgattaacaatgttatcaaagcggctcacgctgaaggtaaatgggctggtatgtgtggtgaaatggctggtgaccaaactgctgttccacttcttgttggaatgggattggatgagttctcaatgtcagcgacatctgttcttcgtacacgtagcttgatgaagaaacttgacacagctaaaatggaagaatacgctaaccgtgctcttactgaatgtgcaacaatggaagaagttcttgaactttcaaaagaatacgttaacgtagactaatcatataaagtggaggcttaggctttcactttttttatatctaaacggagacaaaataatggctccttgtcaactgtagtgggtgacgaaaagctaacatctagagaggacctgataggtcttctctttttttatgttcagaatgatgaagacacgtttcttaaagttgatgaagtttctaaaaccgaagcccaaccgtttgatgtctttaatcaacttattagttgcttcaagttttgcgtttgaatagtctgtttctagcgcattcttgatgtattgcttgtgtctaagaaaagtcctaaagaccgtttgaaagtagtgattgaccttgctaatgttctcctctattaactcaaaaaactcatctactctcttctcctgaaagtgaaaaagcaagagctgataaagtgtatagtagtcggtaagctcttctgaaaagtctagtgtcttcgtaacgacttcatgtggtgctaaagtttgacggaaagtctttgaatagaaagagttgagagataacttacagctgtccttttggaagagtcgccagtgatttttcaaggctcgatagggtagtgacttcttatcgaattggttcataattgcaattcttgtctttaaaaaggctcgactaaggtgctggatgatgtggaaacgatcaagaacgatttttgcgtttggaaagagtctgcgggctagtgggatgtaggctccagacatatccatcgtgataaactgcaccttttggcgagcttttaatggatacttcaaaaagtagtttcgtatagaggtttggcagcgattatcaaggatggttatgagtttgtttgtctcatagttctgagccacaaaagccaattcccctttcttgaaaccaaactcatcccaggacatgacccttgggagtttgtcaaaatgttccttgaaagtaaactgatcaagcttacgatagacggtagaggtcgacacacgaagtcttctggcaatatctgttagtgacatcttctcagttaggagttgtgcaactttttgacggactagatttgagatttggcagtttttctcaacgatagatgtcttagctaccgtgactctcttacaacttttacactggaaacggcgtttcttcagacgtagcagtgtaggcgttccagcttgttcgagaagaggaattttagaaggcttttgaaagtcataattaatcatctttccttggcagtgaggacatgatggtgcagggtaatcaagttttgcttgaatctcgatatgagtgtcagtttcaaaaacaagtgaaatcttgatattttggtctttaattccgattaattctgtggtattcttaataggtctcataagttcttcctaatggtagtttcgtcgcttttcattatagttcttatgggactttttgtgtacacttaaaaagctctataatctctacagtggttttacccactacagaaattatagagccaaaataattgactcattctttagttaggagtagaatacggctaacctaggttaacaattttaactattttttgtcaaaattttctgaataattctcgtttaaatcttggaatatttctaaaaaaatgataaaataggtcttataatagataaaaggagttactatcttggctaaacaatacaaaaactatgtcaatggtgagtggaaaacatctgaaaacgaaattactatttacgcacctgcaaacggtgaggaacttggatcagttccagcgatgagccaagctgaagtagacgaagtctacgcagcagctaaagcagcactcccagcatggcgtgcgctttcatatgctgaacgtgcagcttaccttcataaagcagcagatatcttggaacgtgatgcagaaaaaatcggtcaagttctttctaaagaaatctctaaaggtttgaaatctgcaatcggtgaagttgttcgtactgctgaaatcatccactatgcagctgaagaaggtttgcgtttggaaggtgaagtacttgaaggtggtgcatttgacgctggtagcaagaaaaaaatcgctgttgttcgtcgcgaaccagtaggtcttgtccttgctatctctccatttaactacccagtaaacttggctggttctaaaattgctcctgccttgattgctggtgacgttgttgccttcaaaccaccaacacaaggttctatctcaggtcttcttttggttgaagcatttgttgaagctggtatccctgcaggtgtcttgaactctatcacaggtcgtggttctgttatcggtgactacatcgttgaacacaaagcagttgatttcatcaacttcacaggttcaacaccagttggtgaaaatatcggtcgtttggcagctatgcgtccaatcatgcttgaacttggtggtaaagatgccgctatcgttcttgaagatgctgatcttgacttgactgctaaaaacattgttgctggtgcctttgactattcaggtcaacgttgtacagctatcaaacgtgtccttgtaatggatagcgttgcagatgaattggtagaaaaagtaactgctttggtaggtaatatcactgttggtatgcctgaagaaagcgcaagcgttacaccacttatcgatacaaaagctgctgacttcgttcaaggtttgattgatgatgccgttgaacaaggtgctactgctaaaactgaattgaaacgtgaaggtaaccttatttacccagcagtctttgaccatgtaacaactgatatgcgtcttgcttgggaagaaccatttggtcctgtattgccattcatccgtgtatcttcagttgaagaagcaatcaagatttctaacgaatctgaatttggacttcaaggtgctgtcttcacacaagactacccacgtgcatttgcaattgctgaacaacttgaagttggtacagttcacatcaacaacaaaacacaacgtggtacagataacttcccattccttggtgttaaaggatctggtgccggaactcaaggtgtgaaatactctatcgaagctatgactcgtgtgaaatcaacagtatttgatatcgcaaactactaagagtgtagctattcaatcattaaaaaagtgtggctctttgtcaactgtagtgggtgacgaaaagctaacatctagagaggaccagatcggtcttctctttttgtatattcagagtgatgaaaacacgcttcctaaagttgataaaatttttaaaaccgaagcccagacgtttaatatctttgattagcttattggtcccctccaattttgcatttgagtaatgtgtttctagtgcatttttgatgtattgtttatgtttacgaaaagtcctaaagactgttttgaagtaatgattgaccttgcttatattctcctctatgagctcaaaaaactcatcccccctcttctcttgaaagtgaaacagcaacagctgatagaggttataataattagcgagttcttctgaaaagtctagtgtcttcctaacgacttcatgtggacttaaggtttgaccaaaggtcttcgagtgaaatgatttacaagataacttacggctgtccttttggaagagtcgccagtgatttttcaaggctcggtaggggagtgatttcttatcaaactggttcataatggcaattcttgtctttaaaaaggcacgtccaaggtgctggatgatgtggaaacgatcaataatgatttcggcgtttgggaaaagtctgcgagctagtgggatataggctcctgacatatccattgtaataaactgtaccttttgtcgaactttcaatgggtacttcaaaaagtggtttcgaatcgtggtttgacggcgattatcaaggatggttatgagtttgttggtctcatagttttgcgccacaaaagcgagttcacctttcttgaacccaaactcatcccaagacataacagctgggagcttgtcataatgctccttgaaagtaaactggtcaagcttacgatagacagtggatgtcgacacacgaagtcttctggcaatatctgttagtgacaccttttcagtaaggagctgtgcaactttttgccggactagattggagatttggcagtttttctcaacgattgaggtttcagccactgttactctcttacacactttacactggaagcgacgtttcttcagacgtagtagtgttggagttccagcttgttcgagaagagggattttagaagatttttgaaagtcatatttgatcattattccttgacaatgagggcatggtggtgcagaataatcaagttttgcatgaatctcgatatgagtattagtttccaaaacaagagaaataatgatgttagggtctttaattccgattaattctgtggtattcttaataagtctcataagttcttcctaatgatggtttggtcgcttttcattatagttcttatgggactttttgtgtacactcaaaaagctctataatctctacagtggttttacccactacagaaattatagagccaaaagtgtaaagagtcccaataataggggctctttttcttgtcttacgaaaaccactagctgtgctagtggttccgaaaagcttttagcgatgtatcaaaaaagtccccctaaagtgttatattagataaggtttcccgaccactaactaatatacaaaaggaggacccctgatgagacaggataataatagtttagcacatactacatggaattgtaagtatcatattgttttcgctccaaaatatagacgtcagataatctatgggaaatacaaagcaagtattggtcaaatcttacggttattatgtgaaagaaaaggcgttgaaattcatgaagcagaagcttgcccagatcatattcacatgttagtgagtataccaccgaaactaagtatttcttcatttatgggatatttaaaaggtaaaagtagcttaatgatcttcgaccgacacgctaatttaaagtataaatatgggaatcgcaaattttggtgtcgaggcttttatgttgatactgttggacgaaatcagaagcgaattgaagaatatattcgtaatcaattacaagaagacgtgatagcaaatcagtttagtctatttgaggagtataatccgtttacaggtgagaagaataaaagaaagtagtcttaaagagacccgctagacgggtcagctagcaaaggtggtgctgaagggaaaccattcggtaggcctttaggcctcggccggaagcagaggctttcagccgaagagcaagccacccgttctgatatgccccctgtcaagtagacaggttaaatatctaaaaaagtgtctgtttttgaaggtcagtcgtacataataaatgtacggctgtttttttatgcagaccacttagacttgtacttttcaattttgttattcttagcgattgggtatgacaaaggatgttctgatgataaggcagcgtttcttactgccaaaggcgttttacagtcatacctactttgtggacgctcttgacagtaaaatcggatatagtctttgatggcatatcggagggaggcctcatctgaaatctcatacatctgatacatttccgattttataattccccaaaaaccttctattggtccgttatcaatacaatggcccactcttgacatggattgaatcatatcagtatctttcagctttttttgaaagttcttattggtatattgaaaccctctatcgctgtgaaatataggcttcgctgcgggatttttttcaatggctttgtcaaatgttttgaagaccagccgattgtcatttcgaccacttatgacaaaagcaataggatagcggtcatataaatcaagtatgacactaagatagagtttcttatgagagttaggaatcttaaactctgtaacatctgttacccattttttgttcggagcagttgtatagaagtttcttgccaacttattttctgcagtttctttaggcttggcagtcttgtattttttccttttcttacggataaaagcgtggatatcgagtactttcataattcggtgaattctctttcttgagtaattcgtatgattgaaatgattgatccaatcggtcattcttcggtatcccaagatgtgtgaaaaacgttcgtcatattctttaattaattccgcaatttcgctgtttaattgttcttgttctggaactattctatgtttccatttataaaatgcagacctcgtaatgccgagctgatgacacatccagctaatgctccaccctttgttggtgttgaagtcttcgatcgctaagtattttgattcgtggcgctgtttgcctagcctcacatccttccgaattctttcactttttttaagagttcaacagtcatatccttttcttctaactgacgttttaagcgcacattttctcttcgtaaacgttctaattcatcaacctcatcatctagtttgtgatgaccccttttgtcaactaaaccttcttcaccatcactatcatactttttcacccacgaatacacttggctataagaaacatcataaagtgatgccgtttccttataattgcgattatgttcaatacaatagttgacaatctctttgcgttcatcaatagtggttttacgtcttgcttttgccatatagacctcccgttttggattgtaatccttaagttctatattggcattatacatcctaatccactttcttaaaagtcctgaagaaatatcatactgatgacctaaatcaatagatgaagcctcaccactaatacatttttctacaagttccattttaaattcttttgaataggaacggttttttgttttctttgtgaatcctaaaatcccatattttttatagatggcagcccaatcttgaatcgtccttgtggaaatatggagacagttacatatctcagatctggaacgattaccattaatataatcgagacaagcttgttctttctcgtatggggtgaacctttctcttctagacataaaaatacctcttaagtagattttaggtatttaccttgtctacttaagaggtatcatatcattctcacgggtggttttgactttaaaatatggtataatagaactaaatttcgaatatagagagttttctgacaatgaataaatcttatttttacttggttatgaagacgcatgagttagaggtaccatacactggtcaacttcgtcgtgtgcgtgttcttctacctaagaactatgaaacggatacagatcgttcttaccctgtcgtgtatttccatgatggtcagaatgttctttatagtaaggagtccttttctggctattcttggaagattatcccaacaatcaagcgtaatcctgatatttcgcgcatgattgttgtagccattgataatgatggtcctggccgtatgaatgagtattcagcgtggaagtaccaagaatctaatatccctggtgtccagttcggaggaaagggtgtagagtatgcagagtttgtcatggatgtggttaaaccctttattgataaggaataccgtaccctctctgaccgtcagcatacagctatgattggttcatctctcggtggtaatatcactcagtttatggggcttgattataaggagcagattggttgtcttggggtattttcttcagctaactggttgcatcaagatgcctttgatcgttatatgtcgcgtcaaaagctcgatgcagatcaacgtgtctacatatatgtaggaactgaggaagctgatgatactgacaagaccttgatggctggtaatattaagcaggcttatatagactcttcattgagctattatcatgatttgattgctcgtggggttgatttggaaaatatcaagattcacattcaatctggtgctgaacacaatgaagaagcttgggcagagaatttaccagactgtcttcgctttttcgctgaaaaatgggactagtctttattaacgcaaattaatttaatttaggaaaaggaatataaatatgaatatcgaacatcttagccactggagtggtcaacttaaccgtgaaatgtatgttaaccgttacggtcacgctggtatccctgttgtggtttttgcctcctcaggtggtagccataacgaatactatgactttggtatgattgatgcttgtgcacgttttatcgaagaaggacgcgtacaattctttacactttcaagtgttgatagtgaaagctggctttgtgattggaaaaacccacatgatcgtgctgaaatgcatcgcgcttatgaacgttatgttattgaagaagctattccatttatcaaacacaaaactggttggtttgatccaatgatgacaacaggttgttcaatgggggcataccatgcgcttaatttcttcttgcaacaccctgatgttttcaataaagtagtagcccttagtggtgtctacgatgctcgtttctttgtgggtgagtttggaggggacgaagctatttaccaaaattccccatcagattatatctggaaccaaaatgatggttggtttatcgaccgctaccgtcaagctgagatcatcgtatgtacaggtcttggtgcatgggaacaagatggtcttccatcttactataaactcaaggaagcctttgaacaaaagaatattccagcttggttctctgagtggggtcatgatgtcgctcacgattgggaatggtggcgtaaacaaatgccttatttccttgacaatatgaacctataatttctttgtccatcccatctaaataactataaaagaggaattactaatgaattatcttgttatttcaccatactatccacaaaacttccaacagtttacagttgaacttgctaataagggcatcactgttcttggtattggtcaagagccttatgagcaattggatcaacctttgaaagaggctttgactgagtacttccgtgtagacaatctggaaaacttggatgaagttaaacgtgcggtagcctttcttttctataaacacggaccaattgaccgaatcgaatctcataacgaatactggttggaattggatgctgctcttcgtgaacagttcaatgtttttggtgctaagccagaagatcttaagaagactaaattcaagtctgaaatgaaaaaactcttccaaaaagctggagttccagttgtacctggtgctgtcattaaaactgatgaagatgtggataaagctgtgaaagaaatcggtcttccaatgattgctaagccagataatggggttggtgcagctgcaaccttcaaacttgaaacagaagatgatatcaatcactttaaggctgagtgggatcatgaaacagtttatttctttgaaaaatttgtaacttcaagcgaaatctgtactttcgatggtttgattgatcatgacggtaatattgtcttctcgacaacttttgattatgcccacacaccacttgacttgatgatttacaagatggataattcttactacgttcttaaagaaatggatcctaagttacgtaagtatggtgaggcaattgtcaaagaatttggtatgaaggaacgtttcttccatattgagttcttccgtgatggtgacgattatattgctattgaatataacaaccgtccagcaggtggtttcacaatcgacgtgtataactatgctcactctttcgatttgtacaaggggtatgcggatatcgttgctggcgaaccattcccagcttctcagtttgagccactttactgtttggcgacttcacgtcgtgcaagctctcactatgcttattcagaagaagaactttttgataagtatcgtgaacaacttaaagttaagaaaatcatgcctgcagcctttgcagagttgcaaggtgacttcctctatatgttgacaactccaagtcgtgaggaaatggaacaaatgattgaggactttggtaaaaaagcctaatctgtatatgttaaaagcacttcagagtaaactgaagtgcttttgtgatgccttatttttcgtgaagttcttgatttttaagaaccagttctgaaactttggcgaattttttaagttttttgaggtcttctggatgagttaccaagctaatgaagctaccttcatttcccatacggccggtacgacctgcacggtgagtgtaggcttcacggtctcgagggatatcgaagttgatgactacctctagattttcaatatcgatgccgcgtgccaagaggtcagtacctagtaagagtgaaatctcatgattcttgaatttttccaagataaccttacggaatttgacgttgatgtcactagccaatgataccgctgaagctccgttaaattggaggcgttcttcagtagccccaaggtcagatagactgttaaaaaagacaaggccacggaagtcagggatattggagaacttacggagaagttcgacacggttacgtttatcaacactgatataataatgtttgatagtgtcaagttcttgatcagataggtcataaacgatggtattttcgacaagattttgatcatcaattttgttggttgccgaaatataaatcatttgatggtcacgaggaacatggtggctgatttttgtcacaaagtggtattggctatcactgagaagctcatcaaattcatctaggacgatggtgttgacattcatcatcttgatctttttgagtttaatcagctcaaagacacggccaggtgttccgatgagaatttccggtcctttcttcaggcgttcaatttgtctcttttgactagagccagaaaggaagagttgggcagtgagtcctagtggctcagcccattgtttggtcacatcaaaaatctgtccagcaagctctgaattgggtgctaggataagcaattgctgagattttttgggcttgagtgagaggagcaatgggagaaggtaggctagagtcttacctgttcctgtaggactgatacctaggatattgtctccttcagtgattggtgcaaagagttctttttgaatggcagtctctgtagtgattcctttttctttaaggaggtcttgccattgttcaggaaagtttttaaacataaaagtctcattttctatatggatttgcttttattatatcatgatttagtgtagaatagataagaaagactatattagataggaatttaccatgcctaaaaaaccgattattattggggttacgggtggctctggtggaggtaagaccagtgtttctcgtgccattctatcaaattttccagatgagaaaattgctatgattgagcatgattcttattataaggatcagtcacatttgacttttgaagagcgtgtgtcaactaactacgaccatccctttgccttcgatacagatcttatgattgaacacataaatgagctgattgctgggcgtccagtggatattccgatttatgactacacccaacacactcgtagtgaaaagacttatcgtcaggaaccacaggatgtcttcattgttgaagggattttggtacttgaggataaacgcttgcgtgatttgatggatatcaagctttttgtagatactgatgatgacattcgtattatccgtcgtatcaagcgtgacatggaagaacgtggccgtagcttggatagtattattgagcaatatatcagtgtggttaaacctatgtaccaccagtttatcgaacctacgaaacgctacgcagatgtggtgattcctgaaggtgtcacaaatactgttgctatcgatttgattaatactaaggtagcaagcattttgaaagaaagtcagaaagcctaagcaggagcttggcttttttggtataattgaaacgttatgattattttacaaggaaacaagattgagcgctctttctcaggggatgtgctctttgataatattaatattcaggtagatgaacgcgatcgtattgcccttgttggacgtaacggtgctgggaaatcaaccctattgaaaattttggttggagaggaagcgccgacaagtggtgaaatcaacacaaaacgtgatttgaatttgtcttacttagctcaggatagtcgctttgagtctagcaataccatctatgcggaaatgttaaatgtttttgcaggtcttcgtgcagacgaaaaacgccttcgtgacatggaaatgaagatggctgagttaactgggtcagacttggacaagttaatgactgactacgatcgcctttctgaggatttcagacagcgaggtggttttacctatgaatctgatatcagatccattctcaatggttttaagtttgatgaaagcatgtgggagatgcctatttcagatctttctggagggcaaaacacgcgcttagctttggcgaaaatgctgcttgagaagcctgaactcttggtactggatgaaccgactaaccacttggatatcgaaactattgcctggttggagaattacctggtcaattatcagggagctctaatcattgtcagtcacgaccgttattttttggataaggtggcgacagtaaccctggatttgaccaaacatagtttagatcgttatgtcggaaactattcaaaattcatggaccttaaggctgaaaagttggccactgaagcaaagaacttcgaaaaacaacaaaaggaaattgctaagttggaggactttgttaatcgtaatattgtccgtgcttctacaactaagcgtgctcaagcccgtcgcaaacagctagagaaaatggaacgtctggataagccaacagaaggccagaagtcagctaatatgacttttcatgcggataaggtctctgggaatgtggtcttgacagttaaggatgctgctattggttatgaggatgagattctatcggagcctatttccctggatgttaagaaaatggatgcaatcgccattgtgggtccaaatggtatcgggaaaacaacccttatcaagtcggtagtgggtaaattgccttttatcaagggaacgtcaacctatggtgctaatgttgaagtgggttactatgaccaaacacaatctgccttgacaccgtcgaacactgttcttgatgagttgtggaatgattttgcgacaactcctgaagttgagattcgtaaccgtcttggagcctttctcttctcaggtgatgatgtcaaaaagtctgtttccatgctttctggtggtgagaaagctcgtctgctcctagctaaattatcaatggaaaacaacaacttcctcatcctagatgagccgaccaaccacttggacattgatagcaaggaagtcttggaaaatgccctcattgactttgatggaacgcttctctttgtcagccatgaccgttactttatcaaccgtgtggcaaccaaagtgatggaaatttctgaggatggggcaactatttaccttggagattatgattactaccttgagaaaaaggcggagcttgaagagttagcacgtcttgaagcagaggaaaatcaagtatcagaggaagtccaagtagcttcagcgggtgctagtgattatcaagctcaaaaagccaatcaaaaagagatgcgtaaattaagccgacgcattgagcaaattgaaaatgagttagagacgattgaagaacgattggaggaaatctctgctgccatgcttgaaacaaatgacgtggcagaattgtctgacttacagaaagagctggatgacctatcagtcaatcaagaaactctgatggaagagtggagtgacctatcagaacaattggaaggttaagggatgatgagaaccttttcatgttttgagttgtgaaaggcttacattgttggtataatagttttagtatataaaaggagactaactttatgaacaaagtaaagaaaaaagtgtatcgtaacacaacatctttcaacatgatggcatggggatcatttggcttcttcgtaatcttgatgttggtaggcctctatacccttaaagagcctttgatggttaagggttactacctcatgggatgtgttggtttgatttcatcttcatttacagtatctaaggttgtccgtgataatcaagaagatgaagaaaactataataagctcatcgctcaacaaactttcgaacaataagaggagaagcctgaaaaggctttttctttttgcagaaaatgcacaaatattctgactcttccctagtggaagtgttataatggagtgaaggggtaagatggttttggaatgagataagtccaattcattatcccaaatgccttataagactaattatcgtataagaatgcgttagtgaaaaggtaggtaatcttatggaattcaaagtgaaagatggtcaaatcatctattatcgtgatctcggtaaaggctttccaattgtttttttgcatggcaataatttgtcagggaattactttggtaagcaaggaattctgtatcgagactatcgtttaattttcattgatagtcgtaatcacggcaggtccagtcgtcagagtgttaagatgacctttgaacagatggctgccgatttggaggaaattttgcaatatttgaatatcaagaaggccttatttgtcggtcatagtgacggtgctaatttggctatggtttatgctagtcgttatcctgaccggattgcagggctcttgcttaatgcgggaaatatgacctttaatgggttgacgagacgctcaagattcgcggtctatatacaatatctttgcttaaaagccttgtcaccattttcatctaaaatggatatcatggctcaggtaacgggtctgatgcttcatgacttgccactagatagggaacgtctacatcaggctgcctatcctgtttgggtagttatggggcaaagggatgttatcagtattaggcattctagagagatttcagaactctttcctattcataagctctatgtccaacgtcgagaaggacatcgtctagctcaacgtaaatataaggtctttaatcaaatgattcgtgaacttgtgagaattagtcgaaaagaggtggtggcatgaagcgtcttttagagagacttcaacctttaaaagcggccgttaaatccatcttctttatctcgattacggttcttgtcgtcatagaattggttcgtctaaaacggaccatcactttagagtcactggagtcagctctgtccggtttgtctatttggcatcttgttttgatggctgtcatcggactagtcgctgtctcccccatgctcttttatgacatcatactgaataaggagctagaaacggattattccaaatcctatatcttagaaacaagttgggctgtcaataccattaataacttggctggttttgctggtttggtcgatgtgggtctgcgatattccttttattctgaggatgggcaggaaaagacaggtgttaaggcactttctcgtttattgccttattttatgtcgggtctatcccttttaagtggtttggtattcgctgtcttttggttcttccctctaagtccagacttaagaaaatattggttactcttattgggtattttcctttatctgccttttattttctttgtttctagtcgtgaaaagttaacttattttggtcaagtaccgttgaaaacgaggctaagtcttcttttagcttcgacagctgaatggggaacggccctagggagctttgtcagtgtggcttatttaatgggcttacatgttccactttataatctggttccactttatttcctagcggttattattggtatcttctctatgattccgggtggtattggtagtttcgatttgattgtgattaccggtctgacctctatgggggttagcaatgctcttgcggttagtctgctcttgctctttcgtttaacctactacgttattcccttcatgcttggtgttgtcttctttttcaaacacatgggaggacgtatcaacgagaaatacttcaaactttcttcacgagtatttggtggaagtctccaccgttttctcgtctatttgctacgttttttagggattttcttgattttgtctgccctaatccctgaacgcttggctaatgtctactttattagccgttttgatcctattcaggagcagttgatttggcaattcccaagtatcctatttggtaccctattcattttcatggctcgtctcattagacgtcgggttaagggtgcttttgttgcctccttgataacctttgtcttggccttaatttatgtcaatctcaatggtatttcatgggccatgtctttcctaattttactctctttggtgcttatgttgatcatcagaaagaggttgtatcatcgttactttgtttatagttgggaagacaaaaccaaggatttccttttcctagcctttacgattctggttctcctcgttttgggtggcagcggtttttggtctcatttattgccacctaagaatcgggatgttcttggacattttgttcatatttggtttgatattttactggcatcagttatcattgcaactattgtttggggagtcttgagaattttggcaccccgcaggccttttggtcaaagcatggatgatgagcgcttcacagctctccttgagaaatatggaggtgcatcagaaagtgccctggcttatttacatgataaacgcctcttttggtatcgtgtcgatggacaagaccaggtagttttccaatttgcacaaaccagtaacaagtgtgtggttatgggaaatccgataggtaatgaaaactattaccgagtagcttgggaatctttcttgaagaccttatcggattggaatttacaagccttgttttatgaggcagatgagagtattaccctgatgcttcatgattatggctttgattttatgaaatttggggaaaatgccatggttgatttgacgtcattttctgttgatggtaaacatggtaagaagttccgtaagccaaccaatcgtgttgaaaaagcaggtttccagtttaagttacttgaccctccattttcagagactcagatgcaagaaatgaaggctgtctcagatatttggcttaacggtcgtaaggagaagggcttctcccttggtttctttgatgaagcctatctgcagcaagcaccgattgctattgttgagagtgaggagggagaaattgtagcctttgccaacatcatgccaaccaaaaacaaacgggtggcgacgattgaccttatgcgttatgactttgaaaaggcacccgaaggtatcatggattacctctttgtgaaactcttccagtacttccaagcagaaggaaagcagtattttgatatgggaatggctccactcgcgaatgtgggtactgaagaagatagttttttggaagagaaggttgccaatttggtctatgtctttgcgcagcgtttttactcttttagtgggctccaacgttataaggagaagttctctccaatttggtctcccaaatacattgtttatcctaaacgtacttggctcttgtttgatatgattgccattctaaggattgataatcgaaaaattgaagacagattgaagaaaagacgactttggaaatagatatgaaaaaatagcgaaacccttagggtttcgctattttgctatgtcatagaattatttttcaaattctgcttttgatttagtatctgcgtattcttcagcgacttcgcttgaaagaatgtcattgtaacttggcaatttaatgtcttggccatatttgttacgaagggcagtagtgaccaaacggtaggccaggttggcgttacgagaaagaattggtccatggaagtagctaccataaacatttttatagtggacaccctcagaaccgtcttccttgttattaccattaccgtagaccacttttccaagtggtttttcatcatcagagaggaaggtacgcccttggtgattctcaaagccatagtaagtttcatcgaactcttcgttatggatcttgatgtcaccaatataacgattattttcttgattaagggtgtagtggcccataacaccgataccatcaatgcggacaccattagcttggatgtaatattgaccaagaagttggaaaccaccacagatggcaagaattactttgttatcttggatgaattgaccaatagcctcacgcttagttgggaggtctttagcaacgatggattgttcgtagtcttgaccacctccaaagaagaccatgtcgtagtggtccttgtcgaagtcatcaccaactgaaacgatgtcgaaggtcatcttagcaccaagtttttcacccacgtatttgatcataagaacatttccgttgtcaccgtaggtattgagtagattaccataaaggtgggcaacatttaggtcataggtgtagtcacgattttctggagatttgagtgaagtataagtcattagttcatctcctttccgacagcatgacgttgagcaagaatatcacggaattcaagcatggcagtgtaggtcgctaagatataggcatgatcgcaatcttgtttttcaatcaaggccataatatcttcaagtttttctgcttgcgtaatcttttcttctggatagccagttacacgaagacggcgggcaatttcagaatggcgaacaccaccagcgttaatctcagggatatccatctcgagaatgctttcgaagttggcatcccaaatccaactggtgtcaataccatcagcatagttggcgttaagaaggactgacaagctaaatggataatctgcaagtttaatcatatccagagcttggctagctcccacaggattcttaattagtacgagagtacatgatttgtcaccaatcttaaaggtttcttggcgtccaaagacagcacgactcttatcaaaaccagctttgatttgctctggagccactccgaagaattcagcgacagagacggcagcaagggcattgtagatgttataaagaccaccgacattaatcttgtaatcttgtccatcaatgacaaattcagaagtagtgttagtgattttagtcaactctgttagcttatagtctaattctggacggtggaagtcacagttgaggcatacatagtcacccagattagcataagtattgaggcgatactgaagaatgctctcacatttagggcagacaattccttcggtattataatgtgccagctctggagcgtgtttttcagtgtcaaaaccatagaagcgtacaggattgaccacttctttagaattaaagagaggactgtccccattggccaaaatagtggcctcaggtgccttagcagcaccatctaaaatcatctgataagtggtataaatttcaccatagcggtccatttggtcacggaaaatatttgtgaagacaaaaagacttggagtgatgtattcagtgatttttggaaggctagcctcgtcaatttccaagacagcgattttcttaccagacttggcttttttagctgttaggaaagtagaagtgattcctgtgatcatgttggctccactaggattggtcacaatctcaccaaaagcttctttaagaatccctactgttaaagctgttgtcagagtcttaccattggttccagtgacaacgacaatctcgtaatccttagctaaagtgtctaaaatatctttgtcaaatttaagggcgatttttccaggcagggttgagccacgtcccaattttgaaaggacgaaatggctagcttttcccgctagaatccccatggtagttttcatagtcatgaatttattttatcataaaaagtagtgattgtagtctcaaaatagttagaattcgtggtataatagaaactgtttaaaaattaaaagaaagtgtgatatgtatgggaatactttcgtccattgatattgatttttggcggtcactctttgatagtccgctgaaagttatcgtcaatagtttggacatattgattgttgcttttttaatttatcgctttattagggccctacgagggacaaaaattatgacccttgttcaaggggttgtcttatttattttagtcaaactgatttctgattttataggcttcacgacgatttcttatttgatgaatcaggttatcaactatggagccattgcggcggttgtaatctttgcgccagagcttcgttctgcacttgaaacctttggacgtacgcctcagcattttttgcaaaataaagaggttagctcagatgagaagttggttcaagccttcgttaaagctgttaagtacatgagtcctcgtaagattggggcgctggtttctattgaacagactcagaccttacaagagcagattgcgactggtattccacttgatgcagtggtgactggggaactgttaattaatattttcatcccaaatacaccgcttcatgatggggctgttatcatcagagataacaaggttgcgacggcttgttcttatctgccattgacggaatctaataagatttccaaagagtttggaactagacatagggctgctattggtctttcagaacagacagatgcactgacctttgttgtgtctgaggaaactggtgcgatttcaattgcttacaaggggaatttcatccatgatctctcggttcaagaatttgaacaagagttgagtcttatcttgttgaaagaacaagaaccacgtcagtcattcttccaacgttggatgggaggtagtaaaaaatgaagcgtttcgtaaatttctttaaaaacgatcgtttatggcagatgctagttgctctcttctttgctgtggtactctttttcacggcatggtcgggaaatacgcaaaataaaaacaatagctcaagtgcatctaatacctttacacaaaccgttgagtcggttcctgtggatattaaatatgatagtgataagtactttatcagtggttattcctatgatgccgaagtctatttgacagcgacaacacagctggctttaacgactgagacaagtagtgatacgcgtcactttaaattagttgctgatttgtcgaatctgggtcaaggaaccagtcgagtacctattcaggttaaggatcttccagctggaatgtctgcgcaagtatcgccatcaaccttgacggcgactattggtaaaaaagccagcaagacctttgacgtcgtagctaacatcacatcagataagttagcaaatggctatgaagttaaaaaagttagcctggatgcaaccaaggtagaggtgacttcgagtgaagatatcattaaccagattgatcatgttcaagcagtattggaaggcgattccaacctgtctgaagattatgatgggaacttggtccttcaagcagtttcgaccaatggaacagtcctagcaagttcaatctcaccagctaaggtgcatgccaagattagtttgcgaaaattaagcaaatctgttcctgtaaaggtcgaactgactggagataaggctagcaatgtgtctagtatcagctacagctttaatcgtggacatgtgactattgttggtagccaagaagctatggataagattgatagcattacagtccctgtggacattagcaaagtgactaaggacacttcaaaaacaatagaccttaaggcagaaggtgttacggttcagcctggcactgttaaggttaacttaaaagttacgcaaaaataggggagttacatttttcctaaattcatgtataatggatgggattgagagggactaatctcataaaaatgtaaccaattaaaaatgtttaaaatcaagggttgaaaatattggcgaaatcttataaagttagattatctagatagatttcactagattgactcttgctaaacagcatcacagtttaaggaggatttagtgcttaagcactaataataaaattatgggtaaatattttggaacagacggtgttcgtggagaagcaaacgttgaacttacgcctgaattggcctttaaattaggtcgttttggtggttatgtgcttagccaacatgagactggccgtcctaaagtttttgtggcacgtgatacacgtatctctggtgagatgttggaatctgccttagtagcaggtttgctctcagtgggtattgaagtctacaaacttggagtacttgcgacacctggcgtctcatacttggtccgtacagaaaatgcaagcgctggtgttatgatttcagctagccacaatccagctcttgataatggtatcaagttctttggtggcgatggttttaaattggacgatgcgcgtgaagcggaaattgaagctcttctcgatgctacagaagatacgcttccacgcccttcggctgaaggacttggaacacttgtggattatccagagggtcttcgtaaatacgaaaaattcttggtggctacaggtgttgacctcggtggcatgaaagtcgccttggatgcggctaatggagcagctgcggtatctgcacgtaacattttccttgacttgaacgcagaaatctctgttattggtgaccaacctgatggccttaacatcaatgctggtgttggttcgacacacccagagcagttgcaagccttggttaaagaaactggctcagctattggtcttgcctttgatggtgacagtgaccgtctcatcgctgttgatgaaaatggcgatattgttgatggtgataaggtgatgtatatcattggtaaacatttgtctcaaaaaggcgagttggctaaaaatactattgtaacaacagttatgtcaaaccttggtttccacaaggcacttgaccgtgaaggcattaacaaggcagtgactgctgttggtgaccgttacgttgtcgaagaaatgcgtaaaaacggatacaaccttggtggtgaacagtctggacacgttattatcatggattacaacacaactggtgatggtcaattgacagcaatccaattgactaaagtcatggttgaaacaggtaagagcttgtctgaattggcttcagaagtgaccatctatccacaaaaattggttaatatccgtgtggaaaatagcatgaaagataaggctatggaagttcctgcaattgccgctatcattgaaaaaatggaagctgagatggctggaaatggacgtatcttggttcgtccaagtggtactgaacctcttcttcgtgttatggcagaagccccaacagatgatgaagtgaactactatgttgatacgattgccgatgttgttcgtgcagaaattggattggactaagtatgatagctaagctcagagccttcatggccaccgaagttttcaagtaccttttctttggtgtcttggcaactttggtctatatggtcagtcgtactttgattttccagtttacccaacaaggaacactttcagcagtcttagcgaatgcgattgccataatctttgccttttttacaaatgacatgtttgtctttaatcaggaaaagacaggtatggttacgcgctttgttaagtttgtgggtgctcgcctattgaccttggtcttggatttggctctggcctatttcttggtcgatacctatccagaaattattggtcaatttgttggtcatagtcatgcttgggtaaacggtatcgagagcctcttctctcaggtccttatcattgtattgaactatattatttctaaattcttcgtctttacaggcgagaaagtataagcaaaaaggaggttgttaggaaatgtgttaaaagcatttcttaccaacctccttttttgatataattgaagagacttaaaaaaatagaaagatgaaacatgtacgtacaattatctcaacgcctcaaggatgtagcaacttatgttcctaaaggcgcaaaactcttggatgtaggcagtgatcatgcctatcttccgatttatttacttgaaaaatgtttgattacttcagctattgcaggtgaagttgtaaaagggccctatgaatctgctcttgctaatgtctcagcttctggtttccaagataaaatcgaggtgcgcttggctaatggcttggctgccttcgaacctgctgatgctgtcacaaccatcacaatttgtggtatgggaggacgtcttattgcggatatccttgatgctgggaaggacaaacttaagggcgtagaccgtctgattttacaaccaaataatcgtgaagatgatctccgtatctggttgatggaaaatggttttgagattattgcagagtctatcatgactgaaaatggcaaatactacgaaatcatggtggcagaagctggacacatgagcctttcggacaaggaagtgcgttttggtcctcatctcatgaaagaccaatctcaggttttccagctcaaatggcaacgcgaaatcaataaattagagattgctttaggatccattccactggccaatcaggctgatcgtacagctattgaagataaaattcaaaccattaaggaggttttgaatcatgttagctagtgaacttattaagacttatgaagaattttgtccacaggagctttctatggaaggtgatgtggttggcttgcagattggtagtctggacaaagagattcagaaggttatggttaccttggatgttcgtgagaatacggtagccgaagccattgaaaaaggtgtggacctcattattgctaaacatgctccaatttttcgtccagttaaggatttggtgtcttcgcctgaccgagatattttacttgacctggttaagcatgatattgcagtctatgtgagtcatactaatattgatgtcgttaatgatggacttaatgattggttctgtgacttacttgacattaaagacaccacttatttaacgcagacttctgaaaatcatggaatcggtcgagtgggtgatatcgtgcctcagactattgaagaacttgcacttaaagtcaagtctgtttttggcttagatagtgttcgcttggttcgttataatcatgacaatcctctagttagccgtgtggctatttgtgggggtagtggtcaaggattttaccaggatgctttgaaaaagggcgcacaagtcttcatcactggtgatgtttactaccatacaggacaggaaatgattactaatggtctcttggcaattgatcctgggcaccatatcgaagccctttttatctcaaagattgctgagaaacttgaggcttggaaacttgagcatgattggaatgtgaccatacttgaaagtcagtcctcaaccaatccttttgaccatttgtaggaggatgagtctgtgacttggcttttacatcaaaatgtggtctttttggccttgcttgctggtctttttacttggggatgtaccattgtcggatcggccattgttttcttcttcaagaatattagccgtaaattgctagatatcatgatgggctttgcggcaggtgtcatgattgcggcctctttttggtcgcttttggacccttctttaacttatgcgactcaaaatggttatgggaagtggtcatggttccctgcggcagctggtttcttgcttggaggtgttgcccttcgtttgattgatgccgtcgttccccatttgcatttggggaatgacatctctaaagcagaaggtattcaacctcgtaagaaaaagttgtccaagacagccctgctctttttggctatcaccattcataattttccagagggattagcagtcggtgtgactttcggagccttggctggtggcaatatgacattcgcgggtcttatgggagccattggtctagctataggtattggtttgcagaatgtccctgaaggtgcagccctctcagttcctattcgagcagatggaaaatctcgtatcaaggccttttattggggatctatgtcagccatcgtggagcctataggggctgttatgggagctgcccttgtcatgttgatgatggcaatcattccttatgctttggcctttgcggctggtgccatgatttttgtggtaacggaggaattgattcctgaatcacaaaccaatggtaatactgacgtagcaaccttgggccttatggttggctttgtcgtcatgatggtcatggacgtggccttggggtaaaagaataataaaaagctgtgcctattgatataggactcagctcttttcaaatagatggagtaaaaaatgaaaattgcaatcgttggtgcaggtatcgtcggttcaacggctgcctactacttatcaaaagaaaaaggcgtagaagttacagtatttgatcatggtcttggacaagcaaccaaggcagcagcagggattatcagcccctggttttccaagcgtcgtaataaggcctggtatcgcatggcccgtttgggagccgatttttaccaagatttagtttcagatcttgaaaaggatggttatgacacgagcttctatgatcagtctggtgtagcccttctcaagaaagacgatagtaaattggacgctttgtaccagcatgcagaaacgagactagaagaatcacccattattggtgaactctctataaaaaatgctgaggatctccctgaattcaatggatttgaccattatctctatgcttctggaggagccagagtggaaggagcagagttgacagctaccttgattgaggcctctgattttgaaaaggtggagggaccagttacactctctcctcttgacaatggcacttacgagattaatgctcaaacttttgataaggtcattctcgcttgtggtgcttggctaggtcaaacgcttgaaccccttggttttgaagtagatgttcgcccccaaaaaggtcaattacgtgactatttctttgaggggttagatactggtaagttgcctgttttgatgccagagggcgaactagatgtcatcccctttgctggtggaaagatttcggtaggagccagccacgaaaatgaccaaggctttgatttgacagttgatgagactgtacttgcaagtctggaggaagaggctaagacctatttccctgacttaagtacggctaagtccttctcagaacgtgtgggaacgagagcctacacgagtgatttctctcctttctttggagaagttccagagcttgagagtgtctttgttgcttctggtttaggatcttcagggctcacgacagggccactgattggaaaaaatctggttgatttggccatgaatcgacctggtagcttggatagtgcggactatccagtggctcagtacattaagaaaaaagactaatagtattaaagttcttctagatatttagactcaagaatcatctggctatttctcgctattgagggatgttggctgattcttttttattagagttatttacatctatttcttatttgattagaaaatgataaaatagtaactgttcatcgattgtaggtgaatactaataaaaaatggggagggactatgttccaaaaagttaaagtatatgtgacagtctttgtttccttgttagccataagtttaggcttgtctgtcaaagcaggggcagcagaagacttggctgtgacaaagacaagaattgtcctagagagttatgagtttggtcctgctgtaaccaaagtcatttttgaatttaatcagaaggtcacaccagaggttgtccacagctcaacccaggttacaacagcaggagttagtcgtcaggtgacgaattcttatgtgtccgacgatcaggggcatgtggtctattatgataacagcaagtacgtgacgcttgaattgagcttaccttcttataatcgctacaacatgggtggaaatgctgaacctatgtattttaacctttctacttggactaaccaatggctggaaagttatatggtatcgatgaaagatttgtcagtagtggcagaaggtagtagtcagtcgaaaatggtgtcttctgagcaagatgccatcaataatcgtttgatgccaacaacggaggttttcgatgagcgagggcaggtaggtaacatgcagtatgcggcatatagtgcccagaccggtacaggaaatagcaccaaacctttgatagtctggctacacggcattggtgaaagagggacagatatgaatattccccttctttcaaatgacgtctatgcgcttacccagtctgatattcaaggccatttcttaacaactggtgatcaggcgcgtggggtcaatgtgcttgctgttcaaacgcagacaccttggggggcggataatgcagcacaactcaaagagaccattgatacatacctagctaatcacccagaagtagataagggacgaatttatcttgccggggtttccaatggtggtggtatggtcttgaccatgggagcaacctatccagattattttgcagctctcattccaattgctgctcccttaactgttgaccaatctgggattgataaactgaaaaaccagcctatgtggttgattcacacgaaagcggacacaacagttcaaccagaaaatagtgtcttgcctctatacaagagtttgattacctctggagcttctaacaaatggttttcatactttgaaacagctaccgggactgatcttcctgggacagagtatgatgggcattgggcttggatttatttcttccatgaccaggtgattggcgttcagcatcctgaaaatacgaaaaattgggatggttatagtggtatggtagccactgacccaacctatggcgatggctctcgagctagtgtcgatgggcaaacctataacagtatctttgactggatgagtgcacaaaggcactgaagaagatgatgattacgctttttaaggaaagtgctacgagtggttatcttcaatctaaaagggtttcaatcgaaatccttttttcattggattaagaaaatggacacttgtgattttcttaatgaaagcttaagaacatagggtttaccgtgacaagagggctgaaaaatgctaaaatatagataatatattagagaaaaaaggagccttcttatgaaaggtattattcttgcaggcggttcagggacgcgtttgtatccattgactcgtgctgcatcaaaacaactgatgccgatttacgataaaccaatgatttactatccactttcaacgcttatgttggctggtattaaggaaatcctcatcatctcaacgccacaggaccttccacgttttgaagagctccttggtgatggatctgagttcggtatttccctttcttacgcagtacaaccaagtccagatggattggctcaagcctttatcattggtgaggacttcattggtgatgatagtgttgcccttgttcttggggacaatattttccatggcaatggtctttctgccatgcttcaacgtgctgaagctaaggaaaaaggagccacagtctttggttatcaagttaaggatccagaacgttttggtgttgttgagtttgacgacaatatgaatgccatctcaatcgaggaaaaacctgagcatccaaaatcaaactttgctgtaactggtctttatttctatgacaatgatgtcgtggaaattgccaaaaatatcaagccaagtcctcgtggcgaacttgaaatcacggatgtcaacaaggcttacttagaacgtggtgacctctctgttgaacttatgggacgtggctttgcttggttggatacaggtactcacgaaagtctcttgcaagctgctcagtacattgaaacagttcaacgtttgcaaaatgttcaagtggctaatcttgaggaaattgcctatcgcatgggctacattactaaagagcaggtcctcgaattggcacaaccacttaagaagaatgaatacgggcaatatttgctccgtttgattggagaagcataatgactgaacaattttttggtaaagaattagctgcacgtaagattgaagccatcccaggtttacttgaatttgatattccagtacatggagataaccgtggatggttcaaggaaaacttccaaaaggaaaaaatgttgccgcttggttttccagaatcattctttgcagaaggaaaattgcaaaacaacgtttctttctcacgtaaaaatgttttacgtggtttgcacgctgagccttgggataaatacatctcagtagcagatgaaggaaaggttcttggaacatgggttgaccttcgtgaaggcgaaacgtttgggaatacttatcaaactgttattgatgcctcaaaaggaatcttcgttcctcgtggtgttgccaatggtttccaagttttgtctgataaagtatcctacagctaccttgtgaacgactactgggcacttgaactcaaaccaaaatacgcctttgtcaactatgctgacccaagccttgatatcaagtgggaaaacttggaagaagcagaagtctcagaagcagataaaaaccacccattactcaaagacgttaaacccctaaaagcagaagatttgtaagaatgagtcttgcatagcagtatcgcgactgcaaggagcgttataagattgttcctgccctagtgaaaacaagattccctaagggaatcttgtagggaaatccggagacttcggcttcggatttagccatgaaaccgaagggttgttggggtccctcactagcgaaaggaacgataaaaaaactaaaatttttggagaaaaaatgactgaatataaaaatatcatcgtaaccggtggcgcaggtttcatcggttcaaacttcgtacactatgtctacaacaatcatccagacgtacatgtgactgtccttgacaaactcacttacgctggtaaccgtgccaacattgaagaaatccttggtgaccgtgttgaattggttgttggtgatattgctgatgctgaattggttgataaattggctgctaaggctgatgctatcgttcactatgcggctgaaagccacaacgataattcattgaacgacccatcaccatttatccacacaaacttcattggtacttacacactcttggaagctgctcgtaaatacgatattcgtttccaccacgtatcaacagacgaagtgtatggtgaccttccattgcgcgaagatcttcctggacacggtgaaggtcctggtgaaaaattcacagcagaaacaaaatacaacccatcatcaccatactcatcaactaaggctgcttcagaccttatcgttaaagcatgggtgcgttcatttggtgttaaggcaactatttcaaactgctcaaacaactatggaccataccaacacatcgaaaaattcattccacgtcaaatcaccaacatcttgtcagggattaaaccaaaactttatggtgaaggtaaaaacgtccgtgactggattcacactaacgaccactcaactggtgtttgggctatccttactaagggccgtatcggtgaaacttacttgattggtgctgatggtgaaaagaacaacaaggaagtgcttgagcttatccttgaaaaaatgggtcaacccaaagacgcttacgaccgtgtgacagaccgtgctggtcacgatttgcgttacgctattgattcaacaaaattgcgtgaagaacttggttgggaaccacaattcacaaactttgaagcaggtttggaagaaacaatcaagtggtacacagatcaccaagactggtggaaagctgaaaaagacgctgtcgaagctaactacgctaagacacaagaagtgcttaaataattggaaaatctatcacttccaaattagtgatagatttttctgttaagaactgttaggagagatgatgaatagaaaagaatggattgaatattttgaagcgattaataatcgtaagcccactattcaggagtgtcagcaggcccttctaaatggtgaatttgttatggaaggaaaacaagccactttttccaacaatggaaagtctgtgactgaagaagtcatgcctttaccaaatcaaatgactggtcaaatggtcaacccagcttattcacagcaaatggtctttgttaagaagaaaaagtttggcaagaagacttttattggtcttgggattgctttatttcttgttgtagcaacaagtcttgtcctctttttgttttcttctaaaggaacaaacttgggtggcttgtgggtaaatggtaataatgctggtttggtttatgagttaagtgggaaaaagtcaaaacttgttgcaggccatagggaagaagaaatcaaagaaatctctattggccagaaagtaagacagaagtttgaaacaagcttagaggacgtcagtgattcaaaactaaaaacgattgctgattttgacaagaaataccaattacagacaaaagagatcatcctggtaaagacgaaagtgtttggatactataatctgattcagaaagatgggacaaacttagttctagatttattcttatcagacctctactacggatcaagaagtaccaaagatttaaaaaagacatgtctttttcataaggcagcggttccaaaagtttttgttgggcaatggaaaaaatttgattccgatgatgattcagaaggagaagggactatctctgaaaatggggttgttactacagattctgatggtaaagatatcttaattgctaagcctttaaaagaatatctggtggatcaatcaggcagtgtagataatgataaggtgcaaaaagagtttgataaaatacagaagtctcttaagtcacatggttttcaggctaagagtgttaatgacatctaccacgatgcgagcaagtcatactattatgtccttgtagatggtggtaagcgcattattctcttagaggatagctttaaccttctctcttataaaggttatcttgaaagagaagacactcgctaatcacaatatctctatcagataagataagaagtacttaaataatagtcaagagtctaacattcctctaggagtgatgggctttttttacttgtaaatacgacattaacttatgacagtgatacaattaattacataattgttacaaaaattacataaaatacttgaattttgtaacaaaatagatataatagacatatagaaaagaggtttatgaaaatgaaaagaaaagttattcgtgtttgttcccttgttttgttgtctgtagctgtttctggagcacttgtcggatgtggctctaagtcagaaaaagacactgcagcatcatctacaacgtcaacttctaaagtagcgaagtcatctcctaatacaaaaacatctgagaagaagtctgctaaaaaggctaagacagaagcttcagcttcaaaggattctcaaggtcaagaagaagcgagtgctcctgaagctagctcttcaaaaaatcaagcctcagctggaaatgatgctcaagcagggacaaatagtagtgctgcttctgagtcaaacaagtctagtcaagcaacagctgatacccaaagtgatgctcctgtcccagcagctttggtaggaacttggactggtacgagtcctcaagcaacagacattagttttacagttgatgctgatggcaacatcacttcaaaggcaaatttcaatgtcgattacgaaccctatcgtcaaagctctacaactgcaacagctgttcaaatttctggtaatctctacgtttgggagggtggcgatttttctaccttgcttcctgggattacaggaatagggggagctggtttccaagctaagcctggctttattcttgaaaatggaacttacacgccagttcaatttatctctgacttgggaccaacctttgattatagcaactataatgctttcccattctcattaacaaaataaagtatagaagctatctgaagagatggcttcttttttggctcaaactcttatcattcgaggtctcatttctgcttaaaaaatggtagaatagttacatgcaaacaaaaccaacgtcagcctatgtgcacattccattttgcacacaaatttgttattattgtgacttttccaaggtctttattaaaaatcagcccgttgatgactacctacgggctttgattcgtgagtgggagcttttagatatcaaggagcttcgcaccctttatattggtggtgggacaccgacagctatttctgcggagcaattggactaccttttaagcaatcttcagaaaaacttggatttgtctaagttggaggagtttaccattgaggccaatcctggggatttgacggttgataagattgaggtgctcaaaaaatcagctgttaatcgcgtatctttaggggttcagacctttgatgacaagcacttgcgtcaaattggtcgcagtcacaatcaggcacagatttacgaaagtattgatagcttgaaggctgctggttttcataatatttccattgacttaatttatgcccttcctggtcaaaccatggatcaggtcaaggaaaatgtgagaaaggcactggaactggatattccccacctaagtctctatagtttgatattggagcatcacacggtctttatgaataagatgcgtcggggtaagctcaatctgccaactgaagacttggaagcagagatgtttgactatattatccaagaattggaaaacaatggttttgagcactacgagatttcaaactttaccaaacctgggatgcagagtcgacataatctcatgtattggaataatgatgagtattatggtgtgggtgctggagcctctggttatgtcaatggtgttcgttattgcaatagaggccctatccagcattatctaaaggctatagctgaggatggtcatgctagacttcacgaagagcatctgactaaggcggagatgatggaagaggagttcttccttggtttgcgtaaaaagtcgggggtgtccatcaaacgttttgaagagaagtttggcttgtcattcgcggatacttatggagacattgtaaaaaaactacaggaagatgggctcttggtcaaggatccagaggtggttcgtatgactaaacgaggactctttttgggtgatagtgtcgctgagcaatttatcttggaggattagatgggattaaaatttagtattccttatcagattccgttttatgagacggatatcacgcatcaggtaaaattaccacacttattagcgttttcattgcaagtatctggtatgcagtcagagtctctgggaaatacggataaggacgtttttgataagtacggtctggtttggattgtgacagactatgcgattgagattgaccgtctgcctcgctacaatgaaaaggtgaccattacaacggaagctatttcctataataagattttctgttaccgtaatttttacatcacagatgaaactggtcaacaaatcatgctctttaagactacttttgcccttatggattatgaaacgcgtaaggtagcagaagtgccagatgaggtggtagcaccttatggggctgataagactaaaaagttgcttagagggcctcgttataaggctttggaaaatccaattgagacgctttatcgtgtgcgttattttgacctagacatgaatggtcacgttaataatagcaagtacttggagtggatgttggatgttttcgatttggactttttgaccaagtatacaccagcccatattgacctcaagtatgttaaggaaattcatcatggatcagaaatttattcaggttacgagtttgaccaagaaagtttgagcagtcaacaccagatttgtgtggatggcaatattcatgctcaggctattatccaatggaaagaaataggagacgagtaggatgacatataaaggttatttgattgatttagatggaactatttacaaggggaaggaccgcattcctgagggagaagccttcgttaaggagttgcagaagcgtcagattccctatctttttgtgacgaataacagtatgcgtacaccagaaatggtccaagaacttttgcgtaatcagtgcgagttggaaacgcctcttgagaccatttacacagctactttggcgacagttgactacatgaacgatatgaatcgtggcaagacggtttatgttatcggtgagactgggcttaaatctgcaattgcggaagcgggatatacggtagatgaggaaaatcctgcctatgttgtggtgggcttggaccgtgaagtcacttatgaaatgttggttaaagcaacgcttgccatccacaaaggggccatatttattggaactaacccagatttgaatatcccaactgaacgtggtcttcttccaggtgctggttccctcttggcccttattgaggcggctacccgtgtgaaaccaatcattattggtaagcctaaagctattatcatgaacaaggctcttgaaatccttgggacagaacgtagccaaactatcgtggttggtgacaattacttgactgatattacagctggtattaaaaatgactttccaacacttcttgtgacaactggatttaccaaggcggaagaggttgcgaatttaccagtaaaacccgaccatgtactttctagtctagcggagtgggattttgatgcgaactaggattaatgctgttctgactccgatttggctcttggccttgtctattctggtgacaatttatctggcatggggattctattattttgatattgactggatgcatcttatggactatgtcattatcggaaagacggagctttggcataatttcaatgtcctcatgcagtacttgacctttccttgggttggtcatctgactatggctgattttccatcgtcggagagtgggctaaagcattttcatgatgtgaagtggctctttcatttggtacaggggcttgttattctactggcttatccagctgtgacctttctttggcgaaatgtgaagaagggcacctttggtctttatcgtaggctttatatgagtttagctgttttaccaatccttattggggttgtgggagtttttctcggatttgatgagttttttacgctctttcatgaagccctctttcctggagatagcagttggctctttaatccaatcttggatccgattatcaacgttttaccagaagagtatttccttcaatgttttgtgattttctttattatttatgaggggttggtggtgagtttgacctggttggcccataagcagcttacaatgtatttgaaaaataaggagtagttatgtctattcgtgataaccatttgcatacccatcattcctatgattcggatgcgaactttactgactatttgacacattttgatggggagattgtaacgactgagcattatgatctctctaatccttataccaaacaggacgatgtgcccgagtacgaggcttatagtcacgaaatcgaaagtcttaacctcaagtatggcaatcgtattaaacgtggcatcgagattggttattaccagcctagagaaagcgatattttagactttttggatggtaaggactatgatctcaaactgctttctgttcaccataatggggtcaatgattatcttgatgatgaggtagctgatatggacaaggcaagcattattcaagagtatctggacaagttggagtacgctattggtcgtgtagacgcagatgttctggctcactttgactatggtttccgcctgtttgaggtgactgttgatgaactaaaagcctatgaggagcagcttaaacgtattttccagaaaatgatggctaatgatttggcttttgagctgaatgcaaagagtatgtatctctatcatcacgaagatctttatcgttatgccttggggcttgttaaggatttgggatgttgcaagtattctatcggctctgatggtcataaattagagcatttccgtctgaactttgataagattcaggggctcttgagagaatttgatattactgaagatatgattatatagcgaagatggcttcaactgaagctgtctttttcttaaggaaaacttaaagaaaaggcgttgttgtgggaattatagaagattttaagctttgcttgttatgctaatgtcaagcaaaaggaacttatggtttctatcttatctttcaaaattggaggtcttctatgaaatttctcaaaaggcatgcctatgccttactctttaccctttttctgatgggggcaaatgtttactctctcttaaaggtctttgtcattccctcagcggtctcaacggtttcggccaatacgactagttcaaccacagcgtcgtcgacggcatctactagcactggtaaggtgactaagacggatacgacttataaagatgacaatatggatatcaaaatcacaacaggtaaaaccagtgataccacttactatgtggcagatatccagctttcgagtgcagattaccttaaaacggctttggcacaaaatacctatgggaccaacatcactgacactacttcaagtattgcccagcaaaacaatgcaatctttgccatcaatggtgactattatggcgctaatcagtcgggttatgtgattaaaaatggtcaagtctatcgtgatactgatcgaaacagtgattacgaggaccttgccgtttactcagatggtagcttcaagacctttaaggaaagcgatacaacggttcaaaaattggttgattcaggtgtggtgaatacctttgcctttggtccaaccttggttgaaaatggtaaggtagctgtatcagaaaatgaagaggttggtcaagccatggctgacaatccacgtacagccatcggagttatcgaagaaagtgacggcagtgtgcactatattgtcattgtctctgatggtcgtaccagtgagtcgtcaggattgactctttatgaaatggcagagttgatgaaatcttatggcgtgacgacagcctacaaccttgacggtggtggctcatctaccatgtacttcaatggtcaggtcattaataagccaaccacaaacggaaacaaaatttcagaaagggcggtgagcgatattgtttacatcggttactaaaaaatcagccagcaaacactttttcacctacatcggactaaccatttttagtctagtctttacctttgtttatgagcgcttttcttatggtgaatcatccatgtttatgcgcatgatgttctttgcaccattggctggagcatttatttatctacttactggactgggaatgtcttgggtgaagaatcgtgcctcaaaacttctctttaattcagccattgctgttgtcgctagtgcttgtttagttaaaggtattgttgaagtctcaggccgtacgactagcgtggatatgccctattggtatgtggcagctggactactttgtttgagtctcctaacgggatttatcagacctaaaagactggcttaacaatgagagcttggagctgtgcttcaggctttttgtcttgctttgaaaaattatttaggataaatatacaaattataatatgaagaaatgatttcaatttgggaaatagtccaaagaaattgtcataaaaaataactgagcaagattttttgtgataggaatttagatagaacgagatcttctgtagtgatgaaagtacttgaaaaaatagtggtttccagttaagctatcacagtcagaagtctctttagggatccacttggtttgtaaaaagataccgcatcaactttttatttatttgaactcaatttcacagcagtttgttttggctattaaatatacatgattttcaactttttataaaaaatatacaaaaaagacttgcattgttctgaattttcatgtagaataatttcaaatctaaatcgttgagagaaaaagtcagatcgtttcacagagagtgcgggaagctgagaacgcatgagatcaaagacgacacattcttgagagcgtatgcgaactctgaatgacagtagtgtacgacgggtggttccgttagagactgggagttacaagtgcgtctttgtgacttcatgaggaagagggggtgacccctgttcgaattaaggtggaaccacgtgccaacgtccttgcaaaagttatttttgcgaggacgttttttgttactcttttttagagtgtgtagcgagaggtacacttggttagagttgaacagaaaggaaaaactatggaaatcaaaggattacgaaagattgaaccctatgtggcgggtagtcagcccagtgagaaaaatatcattaagttgaatactaatgaaaatgcctatggaccaagtccagcagtccatcaagctttagcatccttcgatgcccatcagttacgcaagtattcgactttggatcaagcggctttacgtcaggctttgtctgatcagttgggtgtgcctgctgatcaattgattattggaaatggatcagacgatattttgtcaatggcttttctggctttctttaacagtgaggaagaaatcttgttcccagatttgacttatggtttttacaaggtatgggcagatttgtaccgcatcccatttagagaagtgcccttgaactcttcatttgagattgatactcaagattacctggttgaaaatggtgggattgtccttactaatccaaatgcgccaacaggtatttataaacctctcgatcaaattgaggaaatcgtaaaggccaatcagtcagtagttgtgattattgatgaagcctatattaactttggtggggagactgccttacctcttctagaaaagtatgacaatgtgtttatcacaaggaccttttctaaggacgcctcacttgcaggcttgcgtgtcggttatggcatcggaagtccaaagctaatggctgtgatcaatgccgtcaagaattcggtcaatccctataatgtggatagcattgcagaagtcctagcgactgtagccgttaagtcttgggattattatgaggatagctgtgctaagattatggccacacgtgactggtttagccaagaattgaaggctattggctttgatgttcttccttcaaaaaccaattttgttttggtcaaaccgcacggagtgactgcaggccaattgtttgactatctccaaagtaagaaaatttatgtccgatattttccaaaagtggagcgtatttcagacagactacgcatctctattggaactcaggatgagatggagcgcgtactaatgacaatacaggagttacaagcatgaaaaaaacgacattagccttaggaatgcacgataaacttttcaaacgtgcccgtaccatgtatcagattgagcatcgtatctgtgacttgttgatgacaaagggatttcttcgaattgagacaccaaccttggagcatttcgaagtctttagcgatcttgtggacaatggtaactataatttctttgataaaaatggagatcttgttagtttacgtccggatattaccagccaaattgggcgcgtgattgcttcgacacaagttcatacacccattaaattttcttattctggaaaagtctttaactacaatgaggagatgcgtggcctatccaatgagcatacgcaggctggtattgaaatcataggattccccgttcaccaggccatggaagaagctgtgatatctgctaaagaggctctggatgctgctggtgtcaaaaattacaagtttgagttttcacatgctcgcctcttgcaactcatttttgaagaattagaccttccagctgtaaaagaagcagagttggctgcctatatccgtgataagtcaatcacaggcctcaaggaattcaccaaagaaaatccaagtcaatatgacaaggtcttggaacagttgcccttcctctttggtgagaccaaggctgttttaaccaaggctagagagttgacagacagtgaagcctttttgacggccttggatagtttggaagtcttaaccaatcgcttatcagatagtctcccagagacgacgcttgatttggctcaattgccagcagtgccttactacacaggcatgatgtttaaggtctttggtgataaggtgccagatgcctttgtatcaggtggtcgctacgataaactatttgaacgctttggtgccaccgagttaacagcggttggctgggccattgatgtcgactcggtctatcaagcagtgcatgatgatgtggaatttggaggtgacttggatgactagcaatcaaatcacaattgccttgactaagggacgtattgagaaagatacggttaaattacttgagaaagctggctttgatatgtctttcatggctgataagggacgtaatttgatttttgaaagtcctgacaaacgtttccgttttctcctagtcaaagcaccagatgtgaccacctatgtccgacatggtgtcgcagatattgggattgtcggaaaggatgttttggttgaacatccgacaggctatttggaaatgttagaccttaattttggcctttgtaaattctccgtagcctcgacagaagactataatcctgatgaccataagcgtaaacgtattgcgaccaagtatccaactattgcgacggactattttaatcaaaagggtgaggatgttgagatcatttcgattcaggggagcgttgagattgccccagtcattggtctagcggatgccattgtcgatattgtggaaacagggaatacccttgttgctaatggcttaaaagtttatgaggatatttgcaggatttcagcacgaatgattgttaataaggcttctttgaaaaataacaaggaagttctaccattcatttgtaagattgaatcacttgtagggaacgaggaggtaccgttcgaatgaaacgattaactggaacaaataaagaaattgcagagcttctttatcaggagcaactggaactgtcaaaagaaaatagagacgttgaaagcacggttcaggctatcattgaggacgtcaaaaaacgtggagacgaggcccttcgtgaatattcagctaaatatgataaggttgacttgactgattttgaagttggacaggacttgattgatcaagcctttaaagagattgatccagaggtttaccaagccctagttaatgccaaagaaaacattgaatcctatcacaaacatcagttggagactggttttgaggatcaaccaagtgagggtgttattcgtggtcaattgattcgtcctatcaatcgtgtgggtgtttatgtgcctggaggaactgcggcttatccgtcatcagttcttatgaatgttattcctgctaaaattgctggggttaaagagattattatgattacaccgcctcaagagcactttgttcctgcgattctagtagctgcaaaattggctggtgtggatagcatttaccaagttggtggggctcaaggggttgcggccttagcctttggtacagaaacgattccaaaggtggacaagattacaggtcccggaaatattttcgtggcgactgccaagaaacaagtttacggtattgtcggtattgatatgattgcaggaccatcagaaattggtgttatcgctgatagtagtgccaatccaacctatgtagcagctgacctcttgtctcaagcagagcatgacacacgcgcacgcgccattttggtgacagattctgaagccttggctgatgcggttgaaagtgagattgaacgtcaactcaagcttttgccacgtgaggcgattgctcgtccatctgtcgaaaataacggccgtattattattgccaatgatacagatgccatgttcgaacttatgaacttggttgcgccagaacatttggaaattgctatggacaatgcttatgattacttggaaaaagtggaaaatgctggttccgtctttcttggtcactttactagtgaaccaattggcgactactatgcaggtgccaaccacgttcttccgacgacagcgactagtcgcttttcatcagctttaggcgtgcacgattttgtcaaacgtatccaatatacacaatacgataaggcagcagtcaataaagctcagcatgatatcacaaccttggcttatgcggaaggtttgcaggcccacgccaaggcaattgaagtcagaaacgacaataattgagagagtagaggaagaagttatgagacaagcagaaattgaacgtaatacctttgaaaccaaaattaagttaagcctcaatttggatgctcaagaaccagtagatattcaaacaggtgtcggattttttgaccacatgttgaccttgtttgcccgccacggtcgtatgtctttggtggttaaggctgatggcgacctttgggttgatagtcaccacactgttgaagatgtcggcattgtccttggtcaagctcttaaagaggccttgggcgataaagcaggaatcaaccgttatggaacggcttttgtacctatggatgaaaccctcggaatggcaagtttagacttgtctggacgtagcttcttggtttttgatgctagttttgataatccaaaattgggtaattttgatacagaactggttgaagaatttttccaagccttggcctttaatgttcagatgaatcttcacctcaagattctccacggaaaaaacaatcaccacaagtcagaaagtcttttcaaggcaacaggtcgtgccttgcgtgaagccatcacaatcaatcctgacattcacggcgtaaactcgacaaaggggatgctatgattatcgtcattgattacgatgcggggaataccgcaaatgttctgcgtgcccttgaaaagattggtgtgactgcagaattgtctgctgataaagaaaaaatcctagctgcagatgggttgattttacctggtgtaggtgcttatccaacggctatggcagagttggagcgaagaggcttggtagctgttatcaaagaggcggtcgcacagggagttccccttttaggaatttgtttaggcatgcagattttaacagaaaaaggactggaacatgaagaaacagatggtcttggctttattccaggtgtctgccgtcctattccagccagcaaggagcagcctgtcccacatatggggtggaatgatttggctgttaagcaagccagccctttgacagatggtttagatggccaagctgtctacttcgttcacagctatttcacagatgtccctagccaatacattgatgttaccgcagattatagtattgaggtgccagccatgatccataaagacaatgtttatggggcccaatttcatcctgaaaaatcaggggatattggcttaggtattcttgaaaagtttgcagggttatgtaaagcctagaagctagtgagatcaaagactttttagttagaaaggatggtaggggagatgcaaattctaccagcaattgatattaaggatggacaggctgttcgtctctttaaaggggatttcaaccaacaaaccgttgtcaatccagatgttattgagcaggcaaagacctttaaggatgcgggcattcaatttattcatgtcgtcgacttggacggtgccctagatggtcgtgccactaaccgtgacttgattgcagaggtcaagaaggtttctggacttggcatcgaagttggtggcggtatccgtaccttggaacagattcgtgactatttggaagttggcatcgaccgtatcattatcggttcaatggccgttaaaaatcctgacttcgttcgagcagctttggaggaatttggtgccgataagattgtcgtgggtattgatgccaaggcagggtttgtcgctaccgaaggttggttggaaacaagcaatgtagactacattaccttggctaaggaaatggaaaagatgggcgtaaccctctttgtctatacagacgttgatcgagatggcacactgacaggacctaatcttgatcactacaaacgtttggtatctgaactcacaaccgccaaagtcattgcttcaggtgggattgcagaagtagctgacttagatcacctaaaagagattggtgtggcaggaaccattgtcggcaaagcctactataacggcaatatcacattagaccaactcaggtctttcggaggttaatatgcttaagaaacgtattattccctgtttggatgtcaaggatggccgtgtcgtcaagggggtcaattttgtgaatctgacagatgttggtgaccctgttgattctgcgcgtgcttattatgaagctggttgtgacgaacttgttttcttggacatcacagcgacttcagataaccgtgaaacaacggttgacatggtgcgccgtgttgccgaccaggtctttattccttttacggttggtggtggtatccgttcagttgaagacatgaacaagatgctcaaagccggtgctgacaaggttgccgtcaattcctcagcccttgccaatccacaactaatcgctgattgtgctcaaaaatttgggaatcagtgtgtagtggctgcgattgatgctaaaaagatggctgatgggagctggcatgtctttgtggcgggaggtcgtaaggatacaggtagggaccttatccaatgggctcaagaagtcgtcgccttgggggctggagaaattctcttaaccagcatggacaaggacggcactaagtctggttttgatttggaaatgctcaatcgtgtagcggaggtcgtcgatgttccaatcattgcctctggtggtgcaggaaatattgaggatattgtagaagtctttgagaagacaacagcgacgggtgctctggcagcctctatcttccactttggtgaggtgaatataggcgaaaccaaacaagtcttggcaaatgcaggaattgaggtgagacgatgacagaggttaaacttgattttgacaaacaaggcggactggtaccagtcattgtgacagattacaagacggggcaggtgctcatgttggcctatatgaatgaagagtcctatcagttgacccttgagaccaaacaaatgcattactggagccgttctagaaatgagctttggcataagggtgccacatctggccattttcaatatgtcaaaagcatcaagacagattgtgatcaggacaccttgcttatcgccgtggaacaagaaggagcagcctgtcatacaggagcctacagctgtttctttacggatatatatgatgacaatcaagatagataggagtagctatgttagaaacactttataaggaagccttagatcgtaaaaaaaatcccaaagaagggtcttataccaattacctttttgacaaggggctagacaagattcttaaaaaggttggcgaagaagcgacagaagttgtgattggagccaaaaatgctgataaagaagaaattgccaacgagacagcagacgttctctatcacctagcagtcatgctcgttgaaacaggggtcagccctgaagacgtagaagccgtacttaaagcacgtcaaggcaaacagagcaatgtccatgaccgaaaagaagtaacggattattgaggattagctcaaccaattgagattaaaatgaaaagtctgaagtgatgcttcgggcttttttgctagataaatcctaatcttttatccttctaaccaccgtaagaaagcgctttaaaatgctataataggagtgaagaaagctcgttttatttgaaggatttggtgtgcttatttatacaaatcattgaggaaaggaaggatgtcctatgaagaaaaatactcctaatattttaaagctttctctctttgctattctcctcctctgttctattcttttagttcgttgcacaatggtactaccaaatgcttactccaaggctagggaaaaaacgcaaagaatcttggctcataatggttttaagggaaaggtccaagttaagcatatcaaaaaggtgtttctagatagtgcaggcatttatgtcgattatatctattcagaggacacctacgataatcaacccatagtattagatggaaaaattacatttcaactggactggacagttgttcgtgaggaatatgagactcctggcctttacttgcaaacctatttacaacaaaaatctgtaaaaaaagaagagcagaaactctttaaggagcttaaaaggcaatctttaggctttgatatcgaagatttctctttcaaagataatacactgatagatcaagaggctggtaatcgtcgaaaacatttagctgaagaaaactgtaaaaatggcaagcatgatttttatgggtattatcaaattccttatcaaacaatgattgatgaacatattgttactatgtcaataagagtaagtgatacagaaaataccagtaagaaagatttagaagaggcagcgaagaaactggatgctagcaagctaccagacggagagtacgaattttattttttcacaactgataaagaaaattccgcttactatgacaattccggatatattggctatacctttaacatacaagatggtaaggttgtctaagatgaagatgattagaaagtattttgattttcatcgataagctagactgccatactaggccgttaaaagtggggttacagctaagtgaaaacactaacctcaaaacatgcaaaaacatctccgtaaattagacggagatgtctttttgtcttacaaattctttttcttcttagcttttttggttagggcaaggtcacaattttcaatgtttgagattaggtgtttagttaattggaagtcatccacttggggattcaagtccacttcgtagaccagttgcatggtctcgcctccacctgtggtgttaagggaaatcaagtcgcattcgcttgtgaaattgagcaaggctttagtgattttttggtcaatcaagtcttggtaagggacgttaatggtcaggagcctacgacgttggttgtcggtacgactttgacgattttccaaaagaagccaaacagctagaaggaaaatggtaaagaggacagccagtaagagatagcctgtcccagatgccagaccaataatcatggccatgaagacagcgattagttctctagaaccgctggtggcagaacgaaaacgaatgagactaaaggtccccgccacggcaatagaggtccccaaactaccattgacaaggaagataactagggtcatcaaacatggaagtagggtcaaactgatgacaaattctctggtgtagagggttcggtatttgtaagtccaggttagggccaatcctaaaacaaggctgaccagtaaggccagcatgagttgaaggggacttgcagttgcggttgcatcattaaagatagaattgaagagattagacataggtagcacctcctttttcttgaactggatgtggcccgtagtctagaccttgagacttatgataggcgcagctgtattttgagaatttctgctcttccaaaccatgtttgtctaagatagcttgaagccagtcaggctttttgccaggtgccttgatttccatgataatcgtatcttcatcaagaaggggaaaaccatgatttcccttaaagagactgacgtcttcatcacggtaagtcaaattttggtcaagggtaacacgaactttattgtaggcatagccttcgatagtctctttttctttcatcgaaaaacggtcgtagtagatatacatacgaggtttaagtccctcatcatatcgttgacgtaagtggtggatatcctgtaatagctggcggtcagtgatttgaccatgattcttaccgtctgtcatcaagttagtgatgacaagcggagttgaaacgagacgaaacttatgaccgattccttcatcatctttggctttaacctctaaaaagaccttactatcaattttgggattggctaggtaggtacgcatgcggattttctcttgacggtgattaccatctagggcatcttggatgacgtcaaaattatccgtatcaaagtaaatatttgaaatggtagatgtcggataatcatcctctaccaaatactccttaagatcagtgagcaggtcctcaagattgtcctttgagaccacatattttgtttcaatacgtttaaaacgtgtttccaattgtttaaccatgaaaaaactccttttttagataagatacaaagccgtaaagcaactcccaggaaaatagggggaccagtcgaaggagtttatctccaagcagggcccatctttttcccccgagttgtaggcgtgttcaattagataagatacaaagccgtgaagcaactcctatgaaaataggaatctgttgcaggaacatctattcccaaacagtcgacttattgttttaattcttttttatagtagaaaagttgagcgaaaatgtactatttctatatagcacttactagcttgcctactagtctatgggacttttctgaaagttttcctaagtcaaactttcaccaaacttaacttaagataagtttcagttatcctttagaaatgttttaggtaagtcccgtaaactgtaatcatctaaaacgaacccgagaggaaaaatatatgaaatcaaaaaaactaaaaaaatggacgactttattaacctgtgcgacagccctaacagtcatgacggcttgtagccaatcaagcagtcagtcaactgggacgacgtcaagcacgacttcaaaaacaagtgctgtaacagcaacgaccagtaagaaaacaaataagagcaacagcaactactttacttctaaagattctgatacctcttataacgaaagctcagctactaagattaagttatcaggctcatctgcggatgtttcaggtgatggtgcagccctatcaggttcaactgtaaccatctccaaagctgggacctacgtcatttcaggaaaatccgatggtgtgcaaatcaaggtagacgctggagattcagacgatgtccatattgttctagatggtgctaccatgacaaatacaaatgcagcaatcaatgccacaaaagctggtcatgtctatctgacacttaaagatggcactacaaatacactttctgattcaagttctaatagtgatgaagatgcggatgctgtgattttttctaaaggagatttgaccattaatggttcaggtactctaaacattgatgccaagaaaaacaacggtattaaagccaatgacagccttcatatgactggcggtacctataagatttcctcagtcggtgatgccttcaatgtcaacgatgaactcaacatcacaggaacaactatgaccattgaggctgaagaagatgctgttaaggtcgataatgatgacgacacctcagtaggtaccatgtatctatctgataataccatgaccattaaggctggtgacgacggtattcatgcctctggtgacctgattattgatagtggtacttacaaggttgaaaaatcaactgaaggtatcgaaggtaaatctgtgaccatcaatggtggaaatgtcgatgtctatgcaacggatgatggtgtcaatgcggccaatgctaatgccagtcaaagtgagattttcttcaagatgaccggtggaaccctaaatgttgaggttggccagggcgatacagacccaatcgattctaacggcgatattattgtatcgggtggaacgatcaatctgactggtcagtctggctttgacttcgatggttcagcgacctataccggtggtgacattactatcaatggtgaaaaacaaactaagattgaaaactcaatgcctggtggcggtggccctcaaggtggcggtggtccccaaggtggtggacaaccaggtggctttggaggaggtcactaaagagtcataggatgaaacagaaaggaagtgcctatgtatattattattccagcttatgaaccagacaaacgcctgattcaggtggttcaagatattaccataaaactccctaaagcccgtattattgtcgttaatgatggaagtggcccagactatggcgactattatgacgaaacagccctcttcggggcaaccgtcctaagtcatccggtcaataagggtaaaggagcagctctcaagactgctttcgcttatattcaagaagaagtggttagccaacatcaatcagctcagcctatagtcacggtcgacagtgatggtcaacatctaattaaggatattgtccgtgtggccgaggcaaccgagaataatccaagccatcttatcttaggtgcgcgtgcctttgttggtaaggtgccagcacgaagtcgctttggaaataaagtgactgcggggcttttccgtctagtaacaggtcagaaggtaacggatactcagacaggtcttcgaggcatgtcaaccgacctgattccatggcttcttaatctggatggcaatcgtttcgagtacgagtttaatatgttgcttgaagccaaaaagtcaggccaccaaatctctgaagtccctatcgagaccgtttatctggaggaaaataaaagttcacactttcggcctattcgtgattccatccgtatttacagcccttttttaaagttctctggcacggccgtcttggcctcagtcattgatgcaacagccttatttgtgctctttgccttgacgaagaatctgctcctttcggtcgtgctagctcgtgtgatttcggcttccagccagtgtttgctgaacgccaatgtggtcttcaatccgacaagctctctctttagatcgagtgttcgctactttatgttggtcctggtcctcttggcctgtaactattttttacttagtagtctagttgccattggtttaggcctggttctggcaaaactagttacagaaaccttgctctttttagttagctacagggtccaacataatgtggtttttgcttaatagctgacttgaaaatcgctaactgattgaatagagatagtttatttacctctcaattacctctaaaaattttcctaaaaatatagaaaaaactaccgttttctagattcggtagtttttaatgattgtcaaaatgtttttcaatttacattatgattaaaaattgaaatgacttgataaagactcgaaatggctgaaaaaaatatgctataatgaaattgtttgaattatgtagatttcattcaaactaggaaaatgaaaagaggacctaaaatgggaaaaaaggtacattataagcttcacaaagttaagaagcagtgggtgacgattgccgtcacttcggcagcacttgcctctatcgtaggtggtgctacagtagctaatcaaaaggtttcagccgatgaaacaacgaaaccagttgcctctacgacagctgaaagcgatgttgtcgttgaaacgcatgaagtagccgctccagcagcaactgctacgacagatgcgacagcagtaacaactgacaaggctgctgatactataacagtcgaaactcctgcggcagcaagcactgcagcagatacaagtgctaatactgcagtaccagcaacaactgatcgtgcagcagtagtaaatgatgcaacaacagaaacaccagctgcagcagcgacagatacaacgcttacagtagctgaaaaaccaaaatctggcgttactgaaaaagaagaaacagcagcactctctttggacaacatcaaacaagttgatggtaaatactattatgtcaaagaagatggttcatacaaaacaaattttgctgtttcagttaatggccagttgctttactttggtaaagatggtgctttgacaagcacatcaacacactcgttcacaccaggtacaactaatctagttgatgctttctcttcacataaccgtgcttacgattctaagaaagaaagctttgagttggtagatggttatttgacaccaaatagctggtatcgtccagtcactattttggaaaatggtgaaaaatggcgtgtatcaactgagaaagacttccgtccacttttgatggcatggtggcctgatgtagatacacaagttgcctacctcaatactttctctaaacactttaaccttaacgcaacttattcaaccagccaaagtcaatctgaattgaatgcagctgctaagacaattcaaattaagattgaacaagaaatttcagctaaaaaatcaactgaatggcttcgtcaagcaattgagtcttttgtaaaagaacaagaccagtggaatactacaactgaaaactatacccttgctgaccaccttcaagggggagctcttctttatgtcaataatgacaagacaccttgggcaaattctgattaccgtttgcttaaccgtacaccaagtaaccaagatggttctctaaatggtacaggaagatacttgggtggttatgaattcctacttgccaatgacgttgataactcaaatccagttgtgcaagctgagcagttgaaccaaattcactatcttgtgaactggggatcaattgttatgggtgataaggatgctaactttgatggtatccgtgttgatgcagttgataatgttgatgcagaccttctccaagtttatacaaactacttccgagcagcctttggtgtggataaatctgaagccaatgcactcgctcacatttctatccttgaagcttgggatttaaatgataatgcttataatcaaaaacatgatggtgcagcccttgccatggacaataaccttcgttatgcaattatgggtgcactttatggatcgggctcttcattgaaagatttgattactagcagtttgacagaccgtacaaataatagtaagtatggagatacacaagctaactatatctttgcgcgtgctcatgataaccttgttcaagatatcattcgtgatattgttcaaaaagagatcaatccaaaatcagatggttataccatgactgatgctgaattgaaacgtgcctttgaaatctataatgaagatatgaagaaggcagaaaaacgttatactattaacaatattccagctgcctatgctttgattcttcaaaatatggagcaggtaactcgtgtttattatggagatctttatacggataacggccaatatatggctaccaagtctccttactacgatgctatcacaacgctcttgaagaaccgtatgaaatatgtttcaggtggacaatcgatgaaagtcgacacgttcaatggaaaagaaatcttgtcatctattcgttacggtaaagatattatgactgctgaccaaactacgggtgtagcagagacaagtaaacattctggtatgttgacccttattgccaataatcaggatttctcactgggtgatggtactttgaaagttaacatgggtaaacttcatgctaaccaagcctaccgtccattacttcttggtactgataagggaattgtcacttacgaaaatgatgcagcagcagctggaaaaattaaatacaccgatgctgaaggaaacttgtctttcagtggagatgaaatcaaggggtatcgaactgttgatatgagaggttatcttggtgtttgggtaccagtaggtgcacctgataaccaagatatccgtgttaaaggttcagataagaaacttgacaagacattttctgctactgaagcattggactcacaagttatctatgaaggtttctcaaacttccaagattttgttgaaaaagatagccaatatactaataaattgattgcagaaaatgcagaactcttcaagtcatggggaatcacatcattcgagatggctcctcaatttgtatcggctgatgaccgtaccttccttgattctgttatccaaaatggttatgcctttactgaccgatatgaccttgccatgagcaagaataacaaatacggttctaaagaagatcttcgtgatgcacttaaagcccttcacaagcaaggtattcaagcaattgctgactgggtaccagatcaactttaccaattaccaggacaagaagttgtaacagcaacacgtgctaatagttatggtactccaaaggccaatgcttatatcaataacactttatatgttgcaaattctaaatcatcaggtaaggacttccaagctcaatatggtggtgagttccttgatgagctccaaaagaaatatccacagttgtttgaagatgtgatgatatcaactggtaagaagattgatccatctgttaaaatcaagcaatggtctgctaagtacatgaatggtactaatatccttggtcgtggtagtcgttatgttctcagtaacgatgctactggtcgctactatcaagttactgataatggcatcttcttgccaaaacctttgacagatcaaggtggtaagacaggtttctactatgatggtaagggtatggcctactttgataatagtggtttccaagctaagaatgccttcattaaatatgctggaaattactattacttcgataaagaaggttatatgttaactggtcgtcaagatatcgatggtaagacttatttcttcttgccaaacggtatccagcttcgtgattctatttatcaacaggatggtaaatattattactttggtagctttggtgagcagtacaaagatggttactttgtattcgatgtaccgaaagaaggtacttcagaaacagaagctaaattccgttatttctcaccaactggagaaatggctgttggcttgactcatgctggtggaggattgcaatactttgatgaaaatggcttccaagctaaaggtactaagtatgttactccagacggaaaactctacttcttcgataaaaattcaggtaatgcctacacaaatcgttgggctgaaattgatggtatctggtatgaattcaatgatcaaggctatgcacaagctaagaagggtgaattctacacaacagatggctcaacatggttctaccgtgatgcagctggtaaaaatgtgacaggtgcccttactttggatggtcacgaatactacttccgtgcaaatggtgcccaagttaaaggtgaatttgttactgaaaatggcaagattagctactacactgtagataatggttacaaggttaaagacaagttcttcgaagtaaacggcaagtggtaccatgctgataaggatggtaacctcgccacaggtcgtcaaacaattgaccaccttaactattacttcaatgctgatggaagccaagtcaaatctgatttcttcactcttgatggtggtaagacatggtactatgccaaagataatggtgaaatcgtgacaggtgcctatagcattggcggtaaaaactattacttcaaagaagatggtagccaagttaaaggtgactttgttaagaatgctgatggttcactttcttactatgataaagattcaggggagcgtctcaataaccgtttcttgacaactggtaacaatgtttggtactacttcaaagatggtaaggctgtaaaaggacgccaaaatatcgatggtaaagagtattactttgatcatttgggacgtcaagttaaaggtagcccaatcagcacaccaaaaggagtggaatactacgaatcagttcttggagaacgtgtgacaaacacatggatcactttccaagacggtaagactgtcttcttcgatgaaaatggttatgctgattttgataaataatcaatcaatctaatcttaatctgagagattaagtgaaaaacgatatgatttgacatgaatttataggtgaaatttcttgaaaacgagaatcgtttaaagaaattttgcctttttttgctccttaaagaaaaaaatctgacaaatatcaattttgagtcagaatcgttgtaaaagccattgtatcaagggttttagtggtttttatagaaaatagttttacttatcaaatgatatgaaaatgagaattgaaagcctatgaaataggtgtgttacaaaacttttctaatgttgctgttatgttacatataatttataaaaaaacaattaattcgagaaatagttagaaaataatgatataatgtaattgtttgaaatcggatagatttcagtctgattttgacaaataaaatcacggggaaaattataatggaaaataaggtacactataagcttcataaagttaagaagcaatgggtcacaattgcagttgcctctgcagcacttgctactgtcgtaggaggattgtctgcaacaacatcttcagtttcagcggatgaaactcaagataagatagtaactcaaccaaatttagatacaacagccgatttagttacttctacagaagcaaccaaagaagtcgataaacgtacaaatacaaaagaagcagatgttttaacgcctgctaaagaaacaaatgccgtcgaaacagcaactacaacgaacacacaagcaacagctgaagcagctacaacagcaacaacttctgatgtagcggtggcagctgttccaaataaagaagcagttgtgacaacagatgcaccagctgttacaactgaaaaagcagaagaacaaccagcaacagtgaaggctgaagttgtaaacacagaagttaaagcgccagaagctgctttgaaagattcagaagtagaagctgcgctttccttgaaaaacatcaaaaacattgatggtaaatattactatgttaatgaagatggttcacacaaagaaaactttgccattactgtaaatggtcaattgctttacttcggtaaagatggtgcccttacaagctcatcaacatactctttcacaccaggaacaacaaatattgttgatggtttctcaataaataaccgtgcctacgattcatctgaagctagctttgaattgattgatggttatttgactgcagatagctggtaccgtccagcttctatcatcaaagatggtgtaacttggcaagcatcaactgcagaagatttccgtccacttttgatggcttggtggccaaatgtagatacacaagttaactacttgaactacatgtctaaagtatttaacttggatgctaaatacactagcacagataagcaagaaactttgaatgttgctgctaaggatatccaagttaagattgaacaaaagattcaggctgaaaaatcaacacaatggttgcgtgaaactatttctgcttttgttaagacacaaccacaatggaacaaagaaactgaaaactactctaaaggtggcggcgaagatcaccttcaaggtggtgcccttctctatgtaaatgattcacgtacaccatgggctaactctaactatcgtcttttgaaccatacggctactaatcaaaagggtacaattgataagtcagttcttgatgagcagtcagatccaaaccacatgggcggtttcgacttcttgctagctaatgacgtagatttgtcaaacccagttgttcaagcggaacaattgaaccaaatccactaccttatgaactggggttcaatcgttatgggtgacaaggatgctaacttcgatggtatccgtgtcgacgcggtagataatgtcgatgcagacatgcttcaactctacacaaactacttccgtgagtactatggtgttaacaaatctgaagcaaacgctcttgctcacatctcagtccttgaagcatggagtcttaatgacaaccactacaatgacaagacagatggcgctgcgcttgctatggaaaacaaacaacgtttggctctcctcttctcattggctaaaccaatcaaagaacgtacaccggctgtaagtcctttgtataacaatactttcaacacgacacaacgtgatgaaaagactgattggattaacaaagatggaagcaaggcctataacgaagacggaacagttaaacagtctacaatcggtaaatacaacgagaaatacggagatgcgtcaggaaactacgtctttatccgtgcccatgataacaacgttcaagatattattgctgaaatcatcaagaaagaaatcaatccaaaatcagatggtttcacaatcactgatgctgaaatgaagaaagcctttgagatttataacaaagacatgctcagcagcgacaaaaaatataccttgaacaacatcccagcagcatacgctgttatgttgcaaaacatggaaacaatcactcgtgtctactatggagacctttatacagataatggtaattacatggaaactaagtctccatattacgataccattgttaacttgatgaagaatcgtatcaagtatgtatctggtggacaagctcaacgttcatactggttgccaactgatggtaagatggacaattcagatgttgaactctaccgtacaaatgaagtctatgcttcagtacgttatggtaaagacatcatgacagctgatgatacagaaggttctaaatacagccgtacatctggtcaggtaacacttgtagctaacaatccaaaattgactttggatcaatcagctaaattaaacgttgaaatgggtaaaatccatgccaaccaaaaataccgtgctttgattgttggtacagctgatggtatcaagaactttacatctgatgcagatgcaatcgcagcaggttacgtgaaagaaacagacagcaacggtgtcttgactttcggtgcgaatgacattaagggttatgaaacatttgatatgtctggtttcgtagcagtttgggttccagttggagcttcagatgatcaagatattcgagtagcgccttcaacagaagctaaaaaagaaggagagttgactcttaaagcgactgaagcttatgattcacaattgatctacgaaggattctctaacttccaaactattccagatggttcagatccttcagtttatactaaccgtaagattgctgaaaatattgatttgttcaagtcatggggcgtaacatcatttgaaatggcacctcaatttgtatctgctgatgatggtactttccttgactcagttatccaaaatggttatgcctttgcggaccgttatgaccttgctatgagtaagaacaataaatacggttctaaagaagaccttcgtgatgctcttaaggcacttcacaaagctggtatccaagcaatcgctgactgggttccagaccaaatttaccaattgccaggtaaggaagtcgtaacagcgactcgtactgatggtgctggacgtaagattgcggatgctatcattgatcactcgctttatgtagctaatactaagtcatcaggtaaagattaccaagctaaatacggtggtgaattcttggctgagcttaaagctaaataccctgaaatgttcaaggttaacatgatctcaactggtaaaccaattgatgattctgttaaattgaaacaatggaaggctgaatacttcaacggaacaaacgttcttgaacgtggtgttggctatgtacttagcgatgaagcaactggtaaatacttcacagtcactaaagatggtaacttcattcctcttcaattgacaggtaaagaaaaggttgttactggattctcaagtgatggtaagggaatcacttacttcggtacaagtggtactcaagctaaatctgcctttgtaaccttcaatggtaacacctattactttgatgcgcgtggtcacatgattacaaacggtgaatactcaccaaatggtaaagacgtttatcgtttcttgccaaacggtatcatgttgagtaatgcctactatgttgatgctaatggtaatacctacctttacaacactaagggtcaaatgtataagggcggttacactaaatttgatgttactgaaactaaagacggtaaagagtctaaggttgtgaaattccgttacttcactaatgaaggtgtcatggccaaaggtgttacggttattgatggcttcacacaatactttggagaagacggtttccaagctaaagataaattagtaacctttaaaggtaaaacttattactttgacgcacacactggtaatgctatcaagaacacttggagaaacattgaaggtaaatggtatcactttgatgaaaatggtgttgccgctacaggtgctcaagttatcaatggtcaaaaactttactttaatgaagatggaagtcaagttaaaggtggcgttgttaagaatgcagatggtacttatagtaagtacaaagaaggttctggagaattagttactaacgaattcttcacaactgatggaaatgtatggtactatgcaggcgctgacggtaagactgttacaggtgctcaagttatcaatggacaacacctctactttaaagaagatggaagtcaagttaaaggtggcgttgttaagaatgcagatggtacctatagcaagtacgatgctgcaacaggtgaacgtttgactaatgaattcttcacaacaggtgataacaattggtattatgttggttctaatggtaagacagtaactggtgaagttaaaatcggtgctgatacctattacttcgctaaagatggtaaacaagtaaaaggacaaacggtaactgctggcaatggtcgtattagctattactatggtgatagtggtaagaaagccatcagcacatggatagaaatccaaccaggaatctacgtttactttgataagactggtattgcttacccacctagagtgttaaactaatagattgaaaaggagaacttcggttctctttttctaccatttgccaagtctatcaaggctttaagtaaaaaaagagataagatagtggctattctgaggttactgtcttatttttaacactttttgatccataaatgggcatgctaaaaaaacacctcatctggtattttttgaaacaaggtgttaccataatacggcatagacagccttatcgattttgggtcaaagagtaatcgtaaagtttgttatgcgtaatgaggtaatacattgttcgaatgagacgatgtatagaggaaatcgtatgtggcttagttgaagctattgtcgattgtctgtttcgtttctcatagaaatctgcgatatgataaggattggtatggctagctgaagcgatattgcgaatagatttgtacagaattcttcttgcacaaggattcccacgcttagtaatatgctcttgacctaggaaatctcccgactcatagtgtttgagatcaataccgataaaagcgttgatttgattagcagacgtaaagcgacgaatgtctcctaattcgccaataacgcttgtacccgttgtctctgcgatgccaggaatagagagaagaatcacatattcaggtagaggtttagctaactctatcaactgttctaaaacttgttctcgacggcttgtcaaccttataagtttctgtgcattatacttaacctcttctattataggagaggtttttgaaatggcagaataagattgctttaccagtccaactagcttctcagccaagttacctactctgttctctgaaatgcgtttagaggttgactggcgaatagtctctttcaactcaacttccgataattccagcacctaatgctttgttgggaagatggacacgagattctaatattgctcacctgcaggagtagatagtagaatctcgatttctgggaaggcgacttgaagaactttgtgcagcctattcttcgtccttacgatatcctctgtcagattttggtagaaccggctaagatcatgcaagttttgatagactttttcttgaacataaattggcttacggtttaaaacgaattgtgacgaagctagtttccctgcgtcaattttatcggttttccggactcgtaagctgccaagttgctttttagcttccaaaggattaagacgtgtatagtcatagctgttttcttctagaaaagcctgaagtcgacaagagtagacaccattagcttcgaaaataatttcggggtttctcacggtctttagtccttcagtagacgagaaaatccgataatgtcattagacatagtatagccatgaaccctttcaccattcacaagaatagcgacttctgagcttgctttactcacatcaattccaaaaactgtccgcattatgtttacctctttgtcttgaatgattccttattttagtgatttcattttcaatactcgacgtctagcgtccaacatactttgataaaattccatctaaaacaggtgtcttgccagtttttttacggcgtctagcgccaaaagaagccacgacttcacaagacacctctactttaacacaaagaaaaagtagtgagtactcactcccgtcggagatttcttcactactaatcttagtatgttttctacaggcggcaggtctagttgatgaccatgagaatgattgtgaatggaaaagcggaagttagtgagtgcagcgtttaattatctgagaatagagaaaaagctgagaaactcatctcagctttttatacatactattaaatttgttaaagtgaagtcaaaaaagtgagtccacccaaaatcacaccagctgagtttggaataattagtatccaatctttcttgggttcttttgtccatccataaagaacccaaattaaacaagatactgctgcggataaaggctggaatggttgagctttgttgccttgtaaattggcaaaaatttgtgggatgtaggcgataaatacaataatcccgataaaggccccaatggaaccgacaatttgatttattttttgtttagtcatatatacctccaattgtagagtatcaaaatgattgaaaataggcaaggaatatggtcatttgttgttattttctgtataaaatagaataaaatgtttatatctatattttgcagaggatagtatacaatatgttgtgtaaacacaaaaaggaataaatccgttatagtagagttgcgaaacattactagaaagagatttattcctatgactcagtttagcacagaactacttaacttcttagcccaaaagcaagatattgatgaatttttccgtacttctcttgaaacggcgatgaatgatccgcttcaagcagaattgtcagcccttttagggtatgagccttacgataaagtaggctataattctggtaatagtcgtaatggaaactttagtccagctttgatcccctcttatggacgtcgagatgaccacttggaagagatggttatcaaactctatcaaaccggcgtaacgactcgagaaattagcgacatcatcgagcgaatggatggtcatcactatagtcctgccacaatttctaatatctcaaaaacaactcaggagaatgtctctgcttttcatgagagaagcttagaagccaattactctgttttatttcttgatggaacctatcttccattaagacgtggagccgttaataaagaatgtattcatatcgcacttggcattacaccagaaggacagaaggttgttcttgggaaatcgccccaaatgaaaacaatgattcatggtccaccctgttagataagcttcaaaaacaaggcattcaacaggtttctcatgtagcgaccgattgcttcaaggggcttgagcagatgatcagtcaggcttacccattagctaaacaacaacgttgcttaattcatattagtcgaaatctagctagtaaagtgaaacgagcagatagagcggttattttgaagcaatttaaaacgatttatcgtactgaaaatttagaaatagcagtcctagctttggaggactttatcgctgaatggaaaccaaagtataggaaagtcatggaaagtctggagaatacggataatcttttaactttttatcagtttccctaccagatttggcacagcatttattcgacaaacctcattgagtctcttaacaaagaaatcaaacgtcaaacgaggctgggacaatagtcctagcctcttaattgtctttggattgtcgagcaagacgcagtggttgagtgggctctactacgctgatttcatcagtttttacagccctactcaactgtgcggaggtgtgacgacgaaatcgacttctaacgaattaccgatttctgtcccactctcctaacgaggaggctctggaacgttatttagttactttgtttgaaaattataatttcaagcaaagtcaacgtatccacaaagggtttggccaatgtgctgacacacttgaaagcttatttgattaacattcttcaactctacttgagtgtttacacaaaattattgacagtatccaattcgattacatgacaattatttaatctttcattaagatagtaaaaaactcgttaaaataagatttatcaagtttttttggcgctaaaaaatgatataatgaatgagtctttaaggtgtagatttttagacaaaaaatatattggggaaaaattgaatatggaaaataaagtacgctataaactgcacaaagtgaagaagcaatgggttactttagcggttgcttcagtagccttggctaccattgttggtgctagtgttaccacgtcttcacttgtttcggcagaagaaataaataatactaatggatcaccttcaacaactacagtcggggaaaatacaaatcctgtggttgaaaaagaggtaggcacaacaacagaggtggcaaatacttcaaatgccacaacaacagaccgagcagcagttactgctgataaaccagctgaaacgacagttcaaccaaattcaggagcaactagtgatagagctgcagcagtagaggttgaagccaaacctgaaacgactgctaagccagaagtagccgctaaaccagaaacagctacaacatctgaagtagctgcaaatgctggagtagccgcttcaacgactgacaagtctaaagagctttctgaagctgaaattaaagctgcagtctcactcgataatattaaaaaagaaaaagatggtaaatattactatcttttagaagatggatcacataagaaaaactttgccattactgtaaatggtcaggtcctttattttgatgagaatggtgtcctttcaagcacatcaacttattcattcacacaagaaacaacaaatcttgtcactgattttactaaaaacaatgctgcttacgattcaacaaaagcaagctttgaacttgttgatggttatttgacagctgatagttggtaccgtccaaaagaaatccttgaagcaggaacaacttggaaagcgtcaactgaaaaagattttcgcccacttttgatgtcttggtggcctgataaggatactcaagtagcttacttgaactacatgactaaggctcttagcaatggtgaagaaacaaaagatgtctttacgattgaaaattctcaagctagcttgaatgccgctgctcaaatcattcaacgtaagattgaggttaagattgctgctaataagtcaacagactggttgcgtcagtcaatcgaggcctttgttaaagaccaagataaatgggacattaactctgaatctccaggtaaagaacacttccaaaaaggggctctcctctttgttaatagtgatttaacgaagtgggctaactcagactaccgtaaacttgaccaaacggcaacaagtcgtttggcaaacgataagatcaagagtggtagtgatgctggttatgagttcttgctttcaagcgatatcgacaactcaaacccaattgtgcaagctgaaatgcttaaccaattgtattactttatgaactggggacaaatcgtctttggtgacaaggacaaagatgctcactttgatggtatccgtgttgatgctgtggacaatgtcagcatcgatatgcttcaattagtgtcttcatacatgaaggctgcttacaaggtcaatgagtctgaagcacgtgcccttgctaatatctcaattcttgaagcttggtctcaaaacgacccatattatgtggacgaacataatacagctgccctttctatggataatggtctccgtttgtctattgttcatggattgactcgtccagtaactaataaaggtacaggtgctcgtaatgcatcaatgaaggaccttattaacggtggttatttcggtctttcaaaccgtgcggaagttacatcatatgatcaacttggttttgcaacctatctctttgttcgtgcacacgactcagaagttcaaacggttatcgcagacattatcagcaaaaaaattgatcctacaacagatggatttacttttacattagatcaattgaaacaagcttttgacatttataatgctgatatgttgaaagtggataaggaatatacgcattcaaatattcctggagcttatgctttgatgcttcaaacaatgggtgcagcaacacgtgtttattatggagacttgtatactgataatggtcagtacatggctaagaaatcaccatactttgatcaaatcacaactcttcttaaagcgcgtcctaaatatgtagctggtggacaaacatcttatatccacaatcttgctggagatggcgtatcgtctgctaaagacaataaagaagttttggtttctgtccgttatggtcaagatttgatgtctaagactgatacagaaggtggaaaatacggtcgtaattctggtatgttgaccctcattgctaataacccagatttgaaattagcagatggtgaaacaattactgtaaatatgggtgcagcccacaagaaccaagcctaccgtccactcttgcttggtacggaaaaaggtattgtgtcatcattgaatgattcagatactaagattgttaaatacacagatgcacaaggaaatcttgtcttcacagctgatgaaatcaaaggctttaagactgttgatatgagtggttacctttcagtttgggtaccagtaggtgcggctgaagatcaaaacgttcttgctaaaccatcaacaaaagcctataaagaaggggataaggtttatagctcttctgcagcacttgaagcacaagtgatttacgaaggcttctcaaacttccaagactttgtcaaagaggatagtcaatacactaacaaattgattgcagctaacgcagacctcttcaagtcatggggtattacgtcatttgagattgcacctcaatatgtctcatctaaggatggcactttccttgattctattattgaaaatggttatgccttcacagaccgttacgactttgccatgagcaaaaacaataaatacggttcaaaagaagaccttcgtgatgccctcaaggctcttcacaaacaaggtattcaggtcattgctgactgggttccagaccaattgtacacccttccaggtaaagaagtagtgactgctacgcgtactgatacacatggtaaggtccttgatgatactagcttggttaataaactttatgtgacaaataccaagtcatcaggtaatgatttccaagcccagtacggtggtgccttcctcgacaaacttcaaaaactttatccagaaatcttcaaagaagttatggaagcgtctggtaagacaattgatccatctgtgaagattaaacagtgggaagctaaatactttaacggtacaaacatccaaaaacgtggttctgactatgttctcagcgatggtaaattgtacttcaccgttaacgataaaggtaccttcctcccagcagccttgactggtgatacaaaagctaagactggttttgcctatgatggtacaggtgtaacttattacacaacatcaggtactcaagctaagagtcagtttgtaacttataacggtaagcaatactactttaacgataagggttaccttgtaactggtgaacaaactatcgatggttctaactatttcttcttgccaaatggtgtcatgtttactgatggtgtcagaaaaaatgccaaaggtcaatcattggtttatggtaagtcaggtaaattgacgactcaaactggttggaaagaagttaccgttaaagatgatagtggtaaggaagagaaattctaccaatacttcttcaagggtggtatcatggctactggtttgactgaagtagaaggtaaggaaaaatacttctatgataatggttaccaagctaaaggtgtcttcgttcctacaaaagacggccatttaatgttcttctgtggtgattcaggcgaacgtaagtactcaggcttctttgaacaagatggtaactggtactacgccaataataaaggctatgttgctactgggtttactaaggtaggtaaacaaaacctttacttcaatgaaaaaggtgttcaagttaagaatcgcttcttccaagttggtgatgctacatactatgcaaataacgaaggtgacgttcttcgtggtgctcaaaccatcaatggagacgaactctactttgatgaatcaggtaaacaagttaaaggtgagttcgtgaacaatcctgatggtacgacttcatactacgatgcaatcacaggtgtgaaacttgttgatacatcactagtagttgatggtcaaacctttaatgtcgatgctaagggtgttgtgactaaggcacatacaccaggcttctatactactggggacaacaactggttctatgcagactcatatggacgtaatgtcacaggtgctcaggtcatcaatggtcaacacctctactttgatgctaatggtcgccaagttaagggtggcttcgtaacgaacactgacggtagtcgttcattctaccactggaataccggtgataaattggtatcaaccttcttcactaccggtcatgatagatggtattatgctgatgataggggtaatgtcgttacaggagctcaagttatcaacggtcaaaaactcttctttgatactgatggtaagcaggttaaaggtgctttcgcaacaaatgcgaatggtagtcgctcatactaccactggaatactggtaataagttagtatcaaccttcttcactagtggagataacaactggtattatgcagatgccaagggtgaagttgttgttggtgaacagacgatcaacggtcaacacctttactttgaccaaactggtaagcaagtgaagggggcaactgctacgaatcctgatggctcaatctcttactatgatgttcatacaggggaaaaggctattaatcgttgggttaaaattccttcagggcaatgggtatacttcaacgctcaaggaaaaggctacgtgtcaaattaagagtaatgaatgaaagaagtcaatcacttttgtggttgcttttttcgtaaaaaattgtctaacttttatacattcaggtcatttgtctgggtaaaaaagtggtataataactcttgctaaatctttattttggagtacacatggctaagtcaaaaaatactattgaaagtcggatagattactcgattctcctgccagttctcatattgctactggttggtttggtttcgatatttatagcgacaaattttgattacccaaagaatcttgtgcaagtcatgtctcagcaagtactatggattttcttaggttcagtacttgcttttgttgtcatgttatttaatacagagtttctttggaagataaccccctggctctatatttttggtctgggacttatggttttaccccttgttttttattcgcctgctttggtggcctcgacaggggcaaaaaactgggtcagtattggatcggtcacccttttccaaccatcagaatttatgaagatatcctacatccttttcctttccagaattggtgtttgggccaagcaaggaaaggaagtgactgacctaaaagatgactggttgctacttttccaatatgtagctgttacgcttcctgtcttagggttactagttcttcaaggagatatggggactgccttggtctttctggctattttagctggtatcatagtggtttcagggatatcctggcgtattatcttaccagttgttttagccttcgctgcaggtttagccctgtttgtcatggtatttatcacagattggggtaaggaagccttgctcaagatgggagtgcaaacctaccagattaaccgtatctcagcttggttggatcccttcacctatgcagatggtatcgcctttcaacagacacaaggcatgatttcaattggtactggtggaatttacggtaaaggttttaatcacctggatttgaacgtacctgttcgtgagagtgatatgattttcacagttattgcggaagattttggtttggtaggtggtggattggttcttctaacctatctcttcctcatttaccgcatgttgcgagtgacgtttaagtctaacaatcgtttctatacctttatttcgacaggttttatcatgatgattgtcttccatatttttgaaaatattggggcagcagtgggaattcttcctttgacaggtattcctttgccctttatttcacaagggggatcatcgcttatctctaacttgattggtgttggtttggtgctttcaatggcttatcaaaccaacctcaacgaagaaaataaaattctcttggctatgtctcgccgtatgcgtacgtctggaactagtcaagtgaaacctatttctaagagtaagtctaagaaaaacaagccttcgaagagtgttactatggccactcaagaattgggcaaggctaaagataaggttgataaggccactgagaaaatgcgtcaaaccatttctcaaaatacgccaagcattcatcaagggaagcgtcgtaagggttcgaaaaagaaaccgacacgtaaacattaagaagaagcaagttggttaatccaacttgtttttctttgaaaaaaattaaggtctgtgaccttttctttgctcctgcctgtggtataatagaagctgactattttgaaaaggggtttgctatgatagagacagccaaacagcaagaacgtgctattttagtaggtgttgaattgcaagaaacagagcattttgacatgtcaatggaggaacttgccagtcttgccaaaactgcaggagcagaggttgtagctagctatacccaaaaacgtgaacgctatgatagtaagtctttcgtgggttcaggaaaattagaagaaatcaaggccatggtggatgcggatgagattactacagtcattgttaataaccgtttaacgcctcgtcaaaatacaaatcttgaagcagcatttggcgtaaaagttattgatcgtatgcaattaattttggatatctttgccatgagggctagaagccatgaagggaaacttcaggttcacctagctcaactaaaatacatgttgccccgtttagctggtcaagggattatgctcagccgtcaagcagggggcattggtagccgtggacctggtgaaagtcagttggagctcaatcgtcgttcgattcgtaaccagattgctgatattgaacgccagttaaagattgttgagaagaaccgagaaaccattcgcgaaaagcgtgttgattcaactacctttaaaattggcttgataggttacaccaatgctgggaagtcaacaatcatgaaccttatgacggatgataagcagtatgaggccaatgaacttttcgcgaccttggatgcaacaactaagaaaatttacttaaaggatcagtttcaagtgaccttgacagatacggttggttttatccaggacttgccaacagaattggttgctgcctttaagtcaacgcttgaagaaagtcgtaatgtggatctccttttgcatgtcattgatgcgagtgatcctaatcacgaagagcatgaaaaggtggtcttagacattctcaaagacttagacatgactgatattcctcgcctagcaatctacaataagatggatgtagctgataatctagtagcaacagtctttcctaatgttcgcctctcagcacgtgataagggaagtcgtgaggccctcagaagactcttgattgatgaaattcaacagatttttgaaccctttagtattaaggtacatcaggatcaagcttataaactttatcagttgagtcaattggccttgctagatagctacacttttgagacagaagtggaagaaatcacaggttatatttcaccgaaaaataaatggaaattggaagaattttatgactgattatatggatttagctttaaaatatggtggttttacaagtttagataaggtctatttggaaaataccttgtcagacctttcggacagtcaaaaattggccttcattacaccaccaccgagcgtgattaatgcttattttgcagagatctaccagaaacaatctcctgaagcagcgacggattactacttggagctgtcaaaagcattggacttgtttaattgggcaccatcttttgatgaacacaagccctttattcgtctcaatctatcaggaaaatcttacggtttttgctttgaaaatgccgatgaagtggccctagtctttgcagagcattcagaggttccaacggctagtattttgtttgagcttgctcaagttttcccacagtataaggtttatcttgaaggaactcaaattaaaatggccaaggtttactttgatgaagaagtgttggaagagttgacaccagagactcagttactaagtcgtgtaactaaactgaagggaaatgtcattaagttggctagctttaatcaagatgaattagtggaacttttgtctcaatataaagggcaaaccgtttattatgactttgctcagcgtgaatgcctggcttatattgtccagaaataagaaaaacgatagatagaaagtatagaaagtcatggaattacaatttttagggacgggcgccggacagccatccaaggctcgtaatgtatcgagtctggttttgaagctactcgatgaaatcaacgaagtctggatgtttgactgtggggaaggtactcaacgtcagattttagaaacaacaatcaaacctcgtaaagttaaaaaaatctttatcacacatatgcacggggaccatatcttcggtctacctggtttcttggctagtcgttctttccaatctagtgaagaacaaactgaccttgaagtttatggtccagttggtattaagcaatacgtcatgactagccttcgtacttcggggacacgtttaccttaccatgtgcattttaaggaaattgatgagcataagctaggtttggttatggaaaatgacaagttcgctgtttatgcagataagttggatcacaccattttttgtattggctaccgagtggttcaaaaggatctcgaaggaaccttggatgctgaggctcttaaagtagcaggtgtgccatttggaccactttttggtcaaattaagaatggtcaagatgtggttcttgaagatggaacgaaaatcattgccaaggacttcatttccgcacctaagaaaggtaaggttatcactatcttaggtgatacccgtaagacaaatgcgagtgttcgtcttggattgggggcagatgtcttggttcatgagtctacttatgggaagggcgatgaaaaaattgccaagagccatgggcattcaaccaatatgcaagcagcacaggtagctaaagatgcgtcagctaaacgccttcttctgaatcacgtatcagcacgtttcatggggcgtgatatcggtaagatggcggcagatgctaaaacaattttcgaaaacacccacatcgttcgtgacttggaagaggtagaaatctaatggctaaacaacgtattattgctattactggtgcctcaggaggccttgctcaagaaattgtcaagcagctctcacccagtgatggtattatcctcttaggacgagacaaggacaaacttgagaaatgttatcgccatgtggaaaataaaacttgccttgccattgacctaagagacgacaaggccattaaagagatggtcgattatctctatcaacgatttggacgtattgatatctttatcaataatgctggtttcggtgaattcaagtcttatgataactacactagccaagaagtccgtgatatgtttgatatcaatacctttgcgacgatgaccttttcacgtttgatggctgagaaaatggtgcaacatggccatggccatatcgtcaatatcgccagtatggcaggaaaaattgcgacagccaactcaagtgtttatgcagcgacaaagtttgcggtaattggcttctcagatgccctgcgtctagagctggctgataaaggagtctatgtgactacggtcaatcctggtccaattgagacatctttcttcaatcaagctgatccctctggagcttatcttgagagtgttaagaaatttgtcctcagtccaaaatacgtggctaaaaagattgtccgtattctgggtaaaaacaaacgtgaagtcaatctaccacgactcttagcagttgcccacaaaggctatacgctatttccacgaatctcggacaaactagctaccaatgtgtttaactacaaataaggggattccagatggcagctaatatccaagcctatttagaaaatctccagcaaccctggggtcaaatctattatgatattctttttgaccaattacaggacatcaaggggaagcgagttcttgattttggcagtggctttggccttgtggccaaccacttggctcaagaaaatcaagttctagctgtagaacccaatgaagaaatggtggccttgcggccccagaatcacccctatcagcaactagtcgggagtctggatcagttagaaagctttgaggatgctagctttgatgtcattctctgccacaatgtcttagagtatgtagaggatcgcaaggtggttctcaaggaattcacccgcctcttgaaaccaagtggcctgctctctatcgtcaagcacaatgaagtcggacgcgtcctgcagaccgtcgtctttgaaaatgatactcagaaagcgcttgatctcctagcaggtcagaatctggaaacccactccatgggcttggccaaggcctatgatctagatagagcagtagaagacctagccctcgaagttcaggactaccaaggaattcgtgtcttttacgccttgcaggacaatcactttaaaggacaagaaggctggcgagagtctatgctcaagatggagctggccgtttgccaagagtccccttacagagatatcgccttcttccagcactataccttaaaaaggagttaagatgttaaattataaaaaagagattccagcgataacagacctactcgcactgtacagttcagtcggctggaccaattatactaacaatccaaccatgctagaagaagctgtcaaagccagtctatggcagttggcggtctatgataaggaagagttagtagcctacattcgcttggtaggagatgggcactctgtccttttggtgcaggacctcttggtgcgaccagattaccagcgccgaggcatcggaaaaaaactcttagaaaaggctttagagacgttcccccatgtctatcaacggctccttgtcactgaacgtagcgagaaaaatttagccttttaccagtccttgggctttgtcgaactttcagagcaagcttgtacagggatgatttataataattgacggagagagagtgggacaaaagtcctagcctcttcttgttttttgattgacgagcaagacgcagtggttgagtgggctctactacactgatttcatcagcttttacagccctactcaactgtgcggaggtgggacgacgaaatcgaattctaacgaattaccgatttctgtcccactctcttttcttgtttttcctaatattacttgaaaatgatagtagaatagagttagttaacgtaaagaggagaagggaatatctgagaaaacacaaatcaaaaagggaacaatatccagactattattttgtctagaaaagtaggtcttgattggaaatgtagcacgagtctaaacaccttccgatattttccattctctttttaggaaacttaggcttttatccactatgataaattttttcatgttataatagatagactagatgacagggagaaaatataagtaacatgattacatcaacgtatgattggaaaataaacacaaaagagccagatgctggcttttttaaacttgccaaagaacgtgggttggcagaaacagcagccaagattgcctatgaacgtggcattacgacagaagatactcttgaagactttctaaaggctgatttatcacaccttcatgatccttatctgcttcatgatatggataaggcagtggctagaattcgtcaggccattgaaaattatgagcaaatcttagtctatggagactatgatgcggatggaatgacgtcagcatcgattgtcaaggaagcccttgaaatgatgggggctgaagctagagtctatttgcctaaccggtttacagatggttatgggccaaacgaaagtgtctacaagtacttcattgaacaggaaggcatttcactcattgttacagtggataatggagtagcgggtaatgaggctatcgcttatgcgcaagagcaaggtgtggacgttatcgttacagaccatcacagtatgccggcacagcttccagatgcctatgccattgtccatccagagcatccagataccgattatccttttaagtatttggcaggttgtggtgtagctttcaaattggcaactgccctccttgaaactattcctactgagatgttggacttggtagccattggtaccattgccgatatggttagcctaacggatgaaaatcgtattatggtcaaggtcggcctggaaattctaaagactactgagcgtattggactgcaagagttactccgtatttcagatgtagacccaacaacgatttctgaagaaacggtaggatttaaactggcccctcaactcaatgccttggggcgcttagatgatccaaatccagccattgaactgctgaccggatttgacgatgaagaagcccaagccattgctctggaaatcaatgctaaaaatgaagaacgtaaggaagttgttcaaaacatctttgatgaagccataaccatggtagacccggacaaacctgttcaggttctggccaaggaaggctggcatcctggcgttctaggtattgtggcggggcgtatcatggaacaaatcagtcagacagtagtggttttgaatattgaagatggcttggctaagggttccgctcgtagtttggaatctatcaatatcttccatgcccttgatgaccaccgagacatctttactgcttttggaggacatgctggagcggcggggatgacccttcctgaagaaaatcttggacgactatcagagattttgtgtcattatgtctacgataatgacattgatacgagtgccaaaaatacgttaaatttagacgaggagctccagctcagtgagcttagcttggataccatcaagagccttgaaaaattagcaccttttggtatggacaataaaaagccagtcttttggctacatgatattaccgttactcaagctaggactatgggacaaaacggagcccatcttaagtttaaggtgaagcaaggcaaggatagctttgacgttgtcgcttttaataaaggtaatctgcttcaagaatttcaacaagctcaaggtttggaattggcagtgaccttgtctgttaatgtttggaatggacagacaacgctacagctcatgctagaagatgcgcgtgtggatggtgttcaattatttgattttcgatcaaaaaacatgtcactgcctgaaggtctaccatcggtagaagaagcagcagacacagagcctgcggttgtcctcaacaccctacctgaatcagcgacagaattaaaagagtggtttgaaggtaaagattttcaggctatctattttaaaaatagcattaaggaagcctattatctgacaggttatggaacaagagagcaatttgcaaggctctataaaaccatttatcaattcccagaattcgatgtccgctataaactggatgaactcagtcattaccttaaaatcgacaagattctcctgattaagatgattcaaatctttgatgaattggattttgtgactattgataatggtgttatgacagtcaataaagaagctgaaaaacgtgagattgaggacagtcagattttccaagatctgaaacgactcgttaagttccaagaacttatggctttgggaacaccacaggaaatttatgactggctttataagtaggggagtctgaatccaaaggattcgtctcgaaatgagggttagcattttctaaatttaatatttcatgctataatggtatgtaaatatttttttggcgaaaagcctataggaagaacaaatgaaattagaagattatattgcatctattgaaaactaccctaaagaaggggttactttccgtgatattagtcctttgatggctgatggaaatgcttatagctatgctatccgtgaaatcgttcagtatgcgactgataagaagattgacatgattgttggtcctgaagcgcgtggtttcatcgttggttgtccagttgcttttgaacttggtattggttttgctccagttcgtaaacctggtaaattgccacgtgaagtgatttcagccgattacgaaaaagagtatggtgtcgatacactttgtatgcatgccgatgcaatcaagccaggccaacgtgtacttatcgtagatgaccttttggcaactggtggtaccgttaaagctacaattgaaatgattgagcgcctaggtggtgtcgttgctggttgtgccttcttgattgagcttgatggtcttaatggacgtgatgctatcgaaggttacgatactaaagtattgatgaacttcccaggataaatctatctatgaattaacaaaaggccttagggcctttttaactcttttaaaacaaaggtgccctctaaatatagtttatagctatagctaactagagaaaatatatatttgataacaatacctccccggtttataatatgaatatagaataaataaggatggagatattgttatgcctataaaacttgataataagttaccagctcttgatgtattgcgttcggaaaatgtcttcatcatggatgagaacagagctagtagccaggatattcgaccaatggaggtcttaatccttaaccttatgcctactaaagaagttacggaaactcaattgctacgtcttttggctaatacgccacttcaaattaacgtcgagtttctttatatggctagtcataagtcaaaaaatacccatgccgaacatatggaaaccttttataagacttttgatgaaattaagcataagtattatgatggtctcatcgtaacaggtgctcctgttgagcaaatgccatttgaagaagttgattattggcaagaattgacacaggtttttgactggtctaaaaagcatgtctattcaacccttcatctgtgttggggagctcaagcaggtctctattataagcatggagtcgacaaggtcccattgtcagagaagctatctggtatctataaacaaacggttgacatgcctgaaaacttccttatgaatggctttgatgatagctttgtgtcaccacactctcgctatactgaggttacgctcgaggatattaaagataagacggatttagacattgttgtgtcaggaccagaggttggtttatctattttagcaagtaagaatcttcgtgaagtatatagtttcggtcattttgaatatgaccgtgatactctggccagagaataccgaagagatttggatgccggaatcgatccagacgtaccggcaaactatttcccagaggatgatccaagtcaggagcctaaacttcgttggaatcttgcggcctctgccttctttagcaattggattaactatgcggtatatcaagaaacaccttatcgtttagaagagttggaagacgatttttcattctacggttatttgtagtagacagtctcaaaagacttatgtgagcgcataaagactttttaggtgtctagctactctgaaaggtaaatatgagtttttttgaacagtatcgatcaggtaatctggtccttcctaatgctttattttttcactttaaggatattttcccatctgcggatgactttctagtatggcagtttctctatctacaaacgacaactcagattggagaagtggcttctagtcagatagcgcaagcaactggaaagacaccaacagaggttaataaaagtattacgacattgactgaggctgggctccttgatttcacgactattaaggttaataatgaaattgagatggttgtagatgcttcacctgccttggcagttttggataagttagtgagcaatgaaaagataacgaccgggcctgtcgttggtcagccaacaaatacacagctcatcaagcaactaacagatgagttggaacaagctttgggaatcttgaatcctatggttattgaagatttaaacaaggaaatccaagaagaacatactgatcccgaacttatccgtgaggctttgaaagaagcagtatttaaccgcaagacaaattggaattacatcaaaggggttctgcgtaactggaaattgagtggtattacgacgaaaattcaagttgaagagcgtcgtttggagcatcaaggtaagaagcaccatcaccaagtttcggatgactttaaaacaggtatggatgcagcccgtcaattatggggtggccaataatgttaggaagaaaacgtgttaatgaggctctagctctcatgggagagatgtttccaaacgctcatggggagttggagtgggaaactcctttccaactgttagttgctgttattttatcagcccagacaacagataaggctgttaataagattacaccaggcttgtgggcgcgttatccagaaattgaggatttagcttctgctaatctcgatgacgttgagatgtgtttgagaacgattggtctttacaaaaataaagcaaagaacatcatcaagactgctagagctgttttaatgaattttgatggacaggttccgaaaacgcataagggattgaaaagtctacctggtgtgggacgaaaaacagctaacgtagtattggctgaagtctatggaatcccttctattgctgtagatacgcatgtctcacgtgtttctaaaaggctaaatattgccccagaggatgctagtgtagaggaaatcgaagcggaactgatgaagaaaatcccaaagagggattggattatcagtcatcaccgtatgattttctttggacgttatcattgcctagctaagaatcccaaatgccagacatgtcctcttcaaagttattgtaagtactataaagaaacaaccaagaaataagctggagaatgtgactttcttcggctttttacacctgtaagaatttgttacaaactagtaacttgacaaaagtctcaggctttaagaaaatagaagaaacgatttagaagcaggagcgatatagtgaatggctgaattcagtaatgaagagtatctgagagccttagctgataatggtgatagagaagcagccaaagaatatgagcaagctttggataatcgtatttttcagttgcagatttcattggctcaaacgagtgacccgcagggtcgtagggaagtgcaaaaactcttggaacaagaggaaaagaaaaaaagggactactttcaagaaaaagaggaaaaagctgtgagcgaatttagacgtcgtaaaaatgaaactacaaagggaagaaaagtttcgagttttgataaactcaaagatcctaaaatcattagatgggtaattggagttgttgcagtacttgcggtggttattcctgtggttaccttgatgtggtatagtaataaccaaaaagaaagtgtaacaaatccatggaaaaatggccagttagctaaaagtaaggaagcagctgcagcatcatctgataatcaatcctctcaagttgatacttcatccttgtctgaccaacagttagaagactgggttgtttctacctatgctaaagaacaaggttcaactggagaaaattataagaatctaggttggaatgtctattcatggacggatgatgatgataacctagtttatgctcaactttatgatgcctatggtaatgatgttcttcttttccgtgtagataagaagggacaactcgaagcttatggtggtattgacggttcaagtgattcttgggacgtcgtttcaaaaaaatatacaaccgattaatgaaactatataaaacacctgactatggtggttgagactgtcttttgacagtcttttttggtataatttaaggtaatcgtgtatacaattaaaaagctgactgagaagatttggggatgatggttctacagaacttttttaatgtcttcaggttttcgaggataggttaaataaaggagagttgtcgtgtcagactatttatcggtcacatccttaaccaaatatttgaaaatgaaatttgaccgtgatccttatttagagagggtatatttgacgggacaggtttccaattttcgtcgccgcccgagtcatcaatatttttcgcttaaggatgaaggagctgttattcaggcgacgatttgggctggagttttcaaaaaacttggttttgaactcgaagaagggatgaaaatcaatgtcgtaggtcgtgtccagatttatgagcctagtggctcttattccattattatcgagaaggctgagccggatggtattggagctttggctatccagtttgaacagcttcgtaaaaaattgactgcagaaggctactttgatgatcgtcataagcaagcgctgcctaattttgtcaaaaaaatcggggttgtcacaagtcctagtggtgcggttattcgagatattattacgaccgttagtcgtcgtttttcaggggtagaaatcttacttttccctaccaaggttcaaggtgaaggagctgcacaggaaattgctgaaaatatccaaaaagccaatcaaagggatgacctagatttacttatcgttggtcgtggtggaggttctattgaagacctctgggcttttaacgaggaaattgttgttcagtccatttttgagagtcgtctacctgtgatttcaagtgttggtcacgaaacagatacgaccttggctgactttgttgcagatcgtagggctgctacacctacagcagcggcagaacttgctactccagtatcaaaggccgatatcttggtttggattcgtgaaagacaaaatagagcttatcaagcctgtttgagacgtatacagtacaatcaagaacgtttggctaaactgtcacaatctgttgtctttaggcaacctgagcgcctatatgatggttatttacaaaagttggatcgactaacaacaaggcttgaaaccttcgtgagtcaagatttcgatcgaaagcaaaaaaaagcggaacttttgaaacaacggttacaaggcttaaatcttctgatcagtgttcagaactatcaagaccgtcgagagtctttgcaacgtttattggtgaccacaactaagaacaccattaatggtaaccgtgtgagattagaaaaggcacaggatgctttattgtctctagatactagccgtattgttgcaaggggctatgccattgtcaaaaaagatgataaacctttaaccagtaccaagaatattaccgaaggtgatcaattaaccgtccaaatgagagatggagaactagaagtagaggtgaaaaatgtcaactaaaaaaacatttgaggaaaatttacaggacttagaagccattgtcactaagctcgaaacaggtgatgttgctcttgaggatgctattgctgagttccaaaaaggtatggccttgtctaaggatttgcagaagaccttggaagatgctgaaaaaacactagttaaggttatgcaagcagatggtacagaaacggaaatggatgcctaatgagcaagctaaataaaattgatgcggctatccgtgattactaccaaaaaaagaatcttcctgtatcaagtgatttaatcactgctattctttattcagttgatagtggcggtaagcgtattcgtccactgattttcttagatttacttgaaggatttggtttagagctaactcctagtcatttcgatgttgcagcgagtcttgaaatgattcatactggaagtctgattcacgatgatctgccggctatggatgatgatgattaccgtcgaggacgtttaaccaaccataagaaatttgatgaagcaacggcgatattggctggcgattctctctttttggatccctttgatctcctggcccaaacagagctatcagcagaaattcgagttcaattgattcaagcattgtctcattcctcaggcaccttcggtatggttggtggccagatgttggatatgaagggggaaggtcaggaactagatttatcgcaactagctaaaattcatgagcataagacaggtatgcttttaacctttccttttgtggcggctggtattgttgctcaaaaaaatctagaggttttggaaaatctgaaagaagctggtcgcctgattggtcttgcctttcaagtccgtgatgatattttggatgtgactgctgatttcgaagaacttggaaagacacctggaaaagatgtagtagcgggaaaatcaacctatccagctcttcttggtctggaaaaatcacatgctatcctcgaagaatcacttagtaaagctgaggctattttccaaaatctagctgagactcaaggtttcaagaaagacagtattatagaaatcatagaaaggttacgactccatgcctaaggaaagagtagacgtcttggcttataaacaaggcctttttgaaacacgagaacaagcaaaacgtggcgtaatggcaggtttagttgttaatgttatcaatggtgagcgttacgataaacctggtgaaaaaatcgatgacgggactgagttaaaactaaaaggtgagaagcttaagtatgtgagtcgtggaggactcaaacttgaaaaagctttggaagttttcaatctgtcagttgaaggtatgacgaccattgatatcggagcctcaacaggtgggtttactgatgttatgcttcaaaatggggccaaactggtttatgctgttgatgtcggcaccaatcagttggtttggaaattacgtcaagatgagcgtgttcgttctatggagcaatataattttcgttatgctgaacctgtcgactttacagaaggactaccgtcttttgcatcaatcgatgtcagcttcatctctcttaatctgattctaccggctttggctaagatattggttgatggggggcaagttgttgctcttgtgaaaccacaatttgaggcgggccgtgaacaaattgggaaaaacgggattgtccgtgagagcagtgtccatgaaaaagtgttagaaacagtgactgcttttgcggttgactatggcttttcagttaaggggctggacttttcacctattcaaggtggtcatggtaacattgagtttctcgcacacttggagaagacaaattctcctcaaaatgatgctcaaacctctattaaggaagttgtagcacaagcacacaaggagtttaaaaagaatgaagaagaatgatcgtttggagttaatccgaaagattgtccaagaaaataaaattacgactcaaggagaattggtaaaattactccaaaatgagggattaaaggctactcaagcgactgtatcgcgtgatatcaatgaaattggtattaccaaagtaccaactgaagacggttcttacatctatgggctctcaactgctcctagacgagtaggtggaacctctgttgcgactcgtcgcttgttgcgcgttgatcgtcaacatgcctttatgaatatcgttgttcaacctgggacaagccgcctcatcaagaagattcttttagatgagtacaagcatttgatttttagtgttattgctgatgatgataccctctttttagtggctcagtcagagttagcagctattgagctacaggggcaaatcattaagtgggttgaagaataggagggcctatgcttctcgaaattacgataaagaatttcgcaattattgaagagatttctctaaactttgagaatggtatgaccgtccttactggtgaaacaggtgctggtaagtccattattatagatgctatgaatcttatgttgggtgctagggcttctagtgaggtcgtccgtcattcagcatctaaggctgaaattcagggcttcttttcaatcgaacaaaatcctgccttggttagtatcttggaagataatggaattcctgttgaggatgaattgattatccgtcgtgaaatcttccaaaatggtagaagtgttagtcgtatcaatgggcagatggtcaatttaacgacgcttaaggctgttgggcacttcttggtagatatccatggacaacatgaccaggaagagcttatgaaacctgctctgcatattatcatgcttgatgcctttggtgacaaggaatttttccagactaagaaagagtaccaggagtattttgaccgctatcgtgagttaagaaaagctgttctagaaaagcagaaaaatgagcaggagcataaggctcgaattgaaatgctagcttttcagatttcagaaattgaagcagtctctctaaaatcaggagaagatttggctttgatgcaggagcgagacaagcttcttaatcataagcaaattgctgataccttaacaaatgcctatgtcatgctggataatgaagatttttcaagcctttcaaatgttcgttctgccatgaatgacctccagtctcttgaagagtatgactctgattacaaagaactctctggaaatctatcagaagcctattatgttctggaagatgtcactaagcaactaggtgattttttggataatctggactttgatgctgggcgtttacaagagattgaacaccgcttagataccattaatgccattactcgtaaatatggtgggactgtcgatgacgtcttggattatctggaaaattcaagtaaagaatacaatcttctgacaggcaactctagctcgtcagatgctatggaacaagagcttaagcaacttgaaaaggacctgcttgcgtctgcggagaccctacaaacagcacgccatcaaattgctacggctcttgaagctgagattaagagcgagttgtgtgacctctatatggataaggctgattttaaagtcacctttactaaggggaaatttaatcgtgatggtaatgagcaggttgagttttacatctcaaccaatccaggtgaaggctttaaaccgcttgttaaggtagcttcaggtggtgaattatcacgactcatgttagcgattaagtcagcctttgcccgcaaagaagataaaacaagtatcgtctttgatgaggttgacactggcgtttcaggacgtgttgcccaagccatcgctcagaagattcataagattgggagtcatggtcaggtcttggccatcagtcaccttccgcaagttattgctattgctgattatcagttttttatttctaaggaaagcgataatgagacaacagtctctcgtgttcgtcttttgacacctgaggaaagggtgcaagaaatcgctaagatgttagcaggtgataacgtgacggaggctgccttgagccaagcaagagctttgttaaaggtggatgactttctttaggaaaagacttgggaaaaactttccagtcatgctataatagaataaaaatttgtgttaagcgagaaaattatgagtaaaatcagaattgtaaccgattcgtcaatcacgattgaaccagaattggttaaaaaatataatatcactgttgtcccattgtcggtaatggtggacggtgtcatctattcagatagtgaccttcgagaagaaggccgtttcttggaaatgatgaagcatagtaaagagttaccaaagacaagccaaccacctgtaggtttgtttgctgagacatatgaaaatcttgtcaaagaaggtgcagaacaaattgtggcaatccacattatgcacacactctctgggacatgtgaagcctcacgtcaaggagctagtctttcaggagcagatgtaactgtcatcgattcaggctttacggatcaatgcctcaagtttcaagttgttgaggcagctaaattagctgaagcaggagctagtcttgatgagattgtagcccatgttgaagaagtgaaaaataaatctgaacttcatattggtgtttctacccttgagaatctggttaaaggtggtcgtattggacgtgtaacaggtcttctgtcttcattgctcaatatccgtgtcatcatggagttgaaagactatcagttgaatacggttgctaaggggcgaggagctaagactttcacgaaatggttagattcttatattaatggtatcaaggataaggaccgcaaagtggcagagattggtatttcttatgcaggaacacctgatttagcacatgaactggctgaaaaacttgagggtttgggtgctccaatttcaatccttgagactggttccatcattcaaacgcacactggtgaaggcgcctttgccgtaatggttcgttatgaataagtggaaagaatcagaattagttagaagccttgtaggcttcttcttgctttttctcttatttctcggcctcttcatttttatcgttcctagtacgcatcagtcatcaaaaattgcagaaaagattaaatctatcaaaaatgaaaatgtgacctatgttgctattggtgattcccttactcaaggggtaggtgatagtagtaatcaaggaggattcgttcctgtgctatcacaggcattagagtcagattttgactggcaagtgacttctcgtaactacggtattgcggggaatacgagtaatcaaattctcaaaagaatgcaagaaaagaaggatattcaaagagatctcaaaaaggctaaagtgatgactctgacagttggtggtaatgatgtgatccatgtcattaaggacaatatcacgaatcttaatgtagctaccttcactaagcctgcccaggcctatcaaaagagattaggacagattattgagctagctcgcaaggaaaataaaacattgccaatttatattgttggtatttacaatcctttttatcttaattttccagagatgacagaaatgcaaactattgtagataattggaaccagtctactgaagaggtgtgcaaagagtacgataatgtgtattttgttcctgtaaatgatttgctttataagggaattgatggtaagggcggtgttacaagctctgatgatacctctcagtctagtaaatcttctcaagatagcctgaacgatgctctttttgaggatgatcattttcatccaaataatacaggttatcaaattatgtcagatgccattttgaaacgtattaaccaaacaaagaaggagtggtcaggtgagtaagatatggaagtggctatttttaggactcttggccttaaatctagctttagtaagtgttgtgatatatagaatcatgactccagtggagacgacaagttctgtatccctacccaagggagcaactaaaattggaaaatatagtatgactaaggatgagcttgacgctgctcttacaggatttgcccagaattattcgactgataagatgcgtttcaaggtcaaggttaccaattctaaaattgtttttgaaagtagctataaggttttaggtcatgctgttcctctatatgtctattttacgccggttgttagtgaatcaggagcaattgtactgcatgtttctgagctttcagctggaaccttgaaactgcctgtttcggatgtccttaagatgattaaacgttcgactaaccttcctgattacatcgcaatcgatagtaagaagggaaaggttaccctaaatattcagtctatgaagaatgagaaggggataacagcacgtgctcaaagcctagatttggttaatgaccgtatcgaatttgacatctataagacaataaattaaaaagcctttactttttgcaaaaaagcgattaaattagcgtttattacttgacctcataggccttttaggataagataatacttgttcaagcgctaaaaaaactattcgcttagaaataaattggaggattgttacaatggctaacaaacaagatttgatcgctaaagttgcagaagcaactgagcttactaaaaaagattcagcagcagctgtagatgcagttttcgcttctatcgaagaattccttgctgcaggtgaaaaagtacaattgatcggtttcggtaactttgaagtacgcgaacgcgctgctcgtcaaggtcgtaacccacaaactggtgaagctatctcaatcgcagcttctaaagttcctgcatttaaagctggtaaagctcttaaagacgcagttaaataatgtaaaaacccctaagattttaggggttttgatttatacgaaataagttaaggaaatctatgaaaaccataacagtggtattgatttttcttttggtttttactgttattaaactatcaggtattgttgctattagcaaactgatgaagccaagtgaagaacaaattgaagaagcgcgtcagaaacgtcttcaagctgaaaaagagggcaaagacccttttgaagactgggatgaacgcgatgatgatggtcttgtctaataagagaatcctcatcaaataacaaaaaaagtttggaagattttccaaactttttttatagactagtcgatgtagtgaagttttcctcggaagtcttcaagagtttcgtaacctttttcttccatgatttctttaagttctttagtaatacggtcaaaaatagcgacaccttctttttgaagggcagtaccaacttgtaccatacttgcgccacaaaggatgtgttcaaaagcatcacgaccagattttacaccaccagtaccaataatttggatttcaggattcaaacgttggtagaaagcatgaacgtttgccaaggcagtaggtttgatgtagtcaccacctataccaccaaaaccattcttaggtttgatgacaacagactcatcttcaatgtaaaggccattaccaattgagttcacacagttaacaaagacaagtgggaattggttgaaaacggcagcagcttggtcaaagtgcacaatatcaaagtatggtggtaatttcacaccaagaggtttcgtaaagtaagaaaagacttcagttaggatctctgttgttgtttcaaaatcgtaagcgatttgaggtttacccggaacgttaggacatgaaaggttgagttcaaccagcccttcatagtcactttcttgaacttttttaagaatggtgtgtgtttcctcaggtgaaagaccaacgagagaaagaaaatgattttttgtattgggttgcttttgtaattcaatgacatagtcaaggtagtattcgaaaccgttatttggcaatcccattgagttgattgacccaagaggtacattcacataacgtggttcaggattaccgggacgggcctcaagtgttcctgtttttgtgacaaatgaacctgcagctgaagcatcaacctctgccaattcttccttagtcatacaatgaacaccagcggcattcataagacagttatcaaatgtaaactgaccaacttttgtagcagtagaaaccataagatcctccttaaagatcacaaagtaaaatgttactatttcatctcattttagcatgaaaagaggcctaaaacaaggaaatattggacgggctaaagcctctaaaacgaaattctgatatcgtctctttttgccaagacaagaagcaatagaattttacagaattttttggattttgctagctttttcaaggttttttgggtagaatagatacagtaaatgggtttaacccaaaataaaaaggagacataactaatggtaaaattggttttcgctcgccacggtgagtctgaatggaacaaagctaaccttttcacaggttgggctgacgtagatctttctgaaaaaggtactcaacaagctatcgacgctggtaaattgattaaagaagctggtatcgaatttgaccaagcatacacttcagtattgaaacgtgcgatcaaaacaactaacttggctcttgaagcatctgaccaactttgggttccagttgaaaaatcatggcgcttgaacgaacgtcactacggtggtttgactggtaaaaacaaagcagaagctgctgagcaatttggtgatgagcaagttcacatctggcgtcgttcatacgatgtattgcctccagcaatggatcgtgatgatgagcactcagcacacactgaccgtcgttacgcttcacttgatgactcagtaattccagatgctgaaaacttgaaagttactttggaacgtgcccttccattctgggaagataaaatcgctccagctcttaaagatggtaaaaacgtattcgtaggtgcacacggtaactcaatccgtgcccttgtaaaacacatcaaacaattgtcagatgacgaaatcatggatgttgaaattccaaacttcccaccattggtattcgaatttgacgaaaaattgaacgttgtttctgaatactaccttggaaaataattataaaagataaaaggcgggatttattccgcctttttttgagaagtgactctcggttcgtctcactttgtaaggtgagatgaacccaggagataattagtctagagtttcgatatactccagtccccaactttcaatggcatctaggacaccttgaaattttctacccatttcagttagactgtattcgacccgtgggggaacttcagcatagactttacgctccacgattttatccttctcgagctgtctgaggtgtcgtgttagaatggtttgggtaatgccaggaattagacgttgtagttcattaaaacgcttagtccccgtactgagttgatagatgatgactagagcccatttgcctgttagtacacgctgcgtcgtggcaaaaggacaaattccgtatttactgactttggttaccataattcctccaaattttttaaaattattctcttatttgacaataatagtatcatatttgatactagataacaataaagtgcctacttgtctttttgttagtaagtgataatattatatcataaataaaagaaacgaggagtaactcatgtcagtaaatttagaaatttttaatgcatataacaatggtcttataacaggtgattttccagctgtttttgagactatggcagatgatattatctggcaccagccaggtcagcatagtaattccggtacagttgttggaaaagaagcacttggagcacacttggctcaattttcagaaaaaacaaacggtaccttcaaagtattgactaactgggtgtctgaaaatattgaccttgtagcagccaatgtgacctttgtcggaactcgcccagacggcgaggaactcaacatgaatggtattgatctttttcgcatggatgatggaaagatcaaggaagtttggctcttttcatcagatcaagcagtagaagatgctttctggggttagacagtaaattaatctataatctgaaatgaaatttgatttatggatcgtgatgatgagcactcagcacacactgatcgtcgttacgcttcacttgatgactcagtaattccagatgctgaaaacttgaaagtgactttggaacgtgcccgtccattctgggaagataaaatcgctccagcacttaaagatggtaaaaacgtattcgtaggagcacacggtaactcaatccgtgcccttgtaaaacacttcaaaggcttgtctgatgacgaaatcatggacgttgaaattccaaacttcccaccattggtattcggatttgacgaaaaattgaacgttgtttctgaatactacctcggaaaataagctgagataagtagttatcattaacaaataaaaagttgacttcggtcagcttttttgttttcttgaaaataaatgtaaatagtggtcagaaaagtcagtcaattcagtaatttttccttgactttcaacttggaaagatgtatcatattaaccaagatacatcgaaaggaaatgagtcaaatgacattcgcaactacaactgttttgctattgcgtaatgagggctagtgcaaaagcattagtcctgtttggcttaccaagcgggaggtaaaaacatctcgcttgggtttccgagtgagatgtttttttactactatcgtttttacttttagaaagaggattgtctatgcgtaaagttgaattttttgatacaagtcttcgtgatggggaacaaacacctggagttaacttctcaatcaaagaaaaagttgccattgctaagcaacttgaaaaatggggaatttctgtaatcgaagcaggtttccctgcagctagtccagattcatttgaggcagtaaaacaaattgcagaagctatgacaacaacttctgttaccggcttggctcgctcagtaaaatctgatattgatgcttgttatgaggctttgaaagatgccaagtatccacaaattcatgtctttatcgcaacaagtccgattcaccgtgagtttaaattgaagaaatcaaaagaagaaattcttgaagctgtaaaagagcatgtgacttatgcgcgtgaacgtttcgatgttgttgagttttcaccagaggatgctactcgtactgagcttgatttcttgactgaagttgttcaaacagcggttgatgctggtgcatcatatattaatattccagatacagtaggatttacgactccagaagagtttgcacgtatttttgatcatttgactgaaaatattaaatcagaccataaagttgtttttggtgttcactgtcacgatgacctcggtatggcaactgcaaatactttgacagcaattaaacacggtgctggacgtgtacagggaactgttaatggtatcggtgaacgtgcgggtaatgttgctcttgaagaagtagctgttgctttgaaaattcgtgaagactttttccaagcaacaagtgatattgttcttaatgaaacaatgaatacttcagagcttgtttctcgcttctctggaattcctgttcctaaaaataaagctgttgttggtggaaatgccttctctcatgaatcaggtatccaccaagatggtgttcttaagaacccacaaacttatgaaattttcacaccagaattggtaggtgtgaagagtaacagtcttcctcttggtaaattgtcaggacgtcatgcctttgttgaaaaattgaaagaacttgagcttgattttgtggaagaagatatcaaaccactctttgccaaatttaaagtcttggctgggaaaaaacatgatattactgatgcagatattcgtgcacttgttgctggtacaagtgtagataatccagaaggtttccacttcgaagatcttcgcttgactactaatgctgatgaaacaatcactgctacagtaagcttggctaatgaagatggtgaatctgttgaatttttggcaaatggccaagggtcagttgaagctatcttcaatgctattgacaaattcttcaaccaaacagttcgcttgacttcttataatattgacgcagtaactgatggtattgatgcgcaagcgcgtgtacttgtaactgtagaaaatgtagatacagatactattttcaatgcatctggtttagactttgacgtcttgaaagcatcagcaattgcctatatcaatgctaatacattggttcaaaaagaaaatgctggtgagatggcacgtaaggtttcttatcgtgaccttccataagccgaagaggagttaaacatgataaagaaaattgtaacactttcaggtgatggaattggacctgagattatggcagcaggtcttgaagttcttgaaaaagtagcttcaaaaattggatttgattacgacatcgatgctaaaccatttggtggtgctggcattgatgccgagggtcatccacttcctaaatcaactttggatgctgctaaatcagcagatgctatcctcttggctgcaattggtggacctaaatatgacaatgcgccagttcgtcctgaacaaggacttttggccattcgtaaggagttgaatctctttgctaatatccgtcctgtccgcatctttgatgctttgaaacacttgtcacctcttaaacctgagcgtattgagggcgtagacttcgtcgttgttcgtgagctcacaggtggtatttactttggtgagcacattttggaagaagataaggcttgcgatatcaatgattattcagcagatgagattcgtcgtatcatgcgtcgtgccttcaagattgctcaaggtcgtggcaaaaaggtcactagcattgataaacaaaatgttttggcaacttctaaattgtggcgtaaggttgctgatgaagtttctttggagtttccagatgtcacccttgaacatcagctcgttgatagtgccgcaatgattatgattaccaacccagctcgttttgatgtggttgtgacagaaaacctttttggtgatatcttgtctgatgaatcaagtgtccttccaggaactttaggtgttatgccatctgccagtcactctgaaaatggtccaagtctttatgaaccaatccatggttcagcaccagatatcgctggtcaaggtattgccaatccaatttcaatgattttgtcagtagctatgatgttacgtgaaagtttcaatgaaactgaaggggcagaattgattgaaaatgctgttgataagaccttgaatcaaggcatcttgacacgtgatttgggtggtcaggcttcgactgctgaaatgacagcagctattattggcaatctctaaactcatgacactgaaattagtgttactaagtgttttgttggtgtggaatctagtcgtcttatccgtttatggccttgataaacataaggctatccgacataagagacggatttctgagaaggcattattattacagacactgatctttggtggtattggtacctttctaggtgggagactttttagacataaaattaacaaatggtactttaagctttgctggcttataggaattgttatagatgtctttcttttataccttattctaacaagactttcggattagctaatccttagattataattggagtattttatgagcggaaaatcaatttttgataaactttgggaacgccacgtcgttactggaaacgagggcgaaccacaattaatgtatgtggatcagcattatattcacgaggttacaagtccacaggcctttcaaggacttcgtgatgctggacgtaaagttcgtcgcccagatttaacttttggtacgacagaccacaacgtccctacggttgatatttttaacattcgtgaccttatttctaaaaaccaaattgatactttggcgaaaaacgttgaggaatttggtattgatgcggctacccacggtactgctcgtcaggggattgtccacatggttggtcctgaaacaggtcgtagtcaaccaggaaaatttgtcgtttgtggagatagtcatacggctactcatggtgcctttggtgctattgcctttggtattggtacatctgaggtagaacatgtctttgcgacacaatgtttgtggcaagtgaaaccgaagaaaatgaaggttgaatttgttggtaaaccacagccaggtgtttattcaaaagactttattcttgcactcattgcacgctatggcgttgatgctggtgtaggatacgcagttgaatattgtggtgaagctatcgatgctctttcaatggatgaacgcatgaccatctgtaacatgtctattgaatttggtgctaagatgggtcttatgaatccagaccaaaaaacttatgattatgttgaggggcgtccatgcgcacctaagggtgagaaattcgaagaagcagtagccgactggaaaactttggtttcagatccagatgctgaatatgataaagtgattactattgatgtttcagaattggcacctatggttacatggggaactaaccctgaaatgggtgttgagtttgatcaaccattcccagaaatcaaggactttaatgatgaacgtgcctacgagtatatggacgttaagcctggtgaatatgctaaagatatcgatcttggctatgtcttcattggttcttgtactaacgcacgtcttagcgaccttgagttagctgctaaattcgttaaaggaaaacatatcgcaccgacattgacagctattgttgttccaggttcgcgtccagttaagaaagaagctgaacgtcttggtttggataaaattttcatggatgcaggatttgaatggcgcgatccaggttgttcaatgtgtcttggtatgaacccagaccatgttccagaaggtgtgcactgtgcatctacaagtaaccgtaacttcgagggacgtcaaggatatggtgctcgtactcacctttgtagtccagcaatggcagcagctgcagcaatcgctggtaaatttgtagatgtccgcgatatgccagaagttcaagcataagggagaagataatggaaaaatttaccgtctatacagggaaatcagtacctttgatgaatgataatatcgatacggaccaactcattcccaaacaattcttgaaagctgttgataaaaaaggtttcggtaagaatttgatgtttgaatggcgttaccttaatgatgattacgatgaaaatcctgatttcgtcttcaataaacctgagtatcgcgatgcgaccattttggttactggtgataactttggttcggggtcatctcgtgaacacgctgcatgggcattggaagattacggtttccgttgtgttattgctggatcattttcagatattcactataacaatgaattgaagaatggtatgttgccaatcgttcaacctttggaagtccgtcaaaaattggctgctcttcctgcaggtgaggaaattacgattgaccttccaaaccaagtgattaaatcttcagcaggagagtttccatttgatatcgatcatgagtggaaacgtaaattggttgaagggcttgacgatattggaatcactcttcaatatgaagatttgattgctgcctatgaaaaacaacgcccatcatattggcaataagaaacaatgatgtgtttgtaaaataataatgaggacttaaaagaatgggataaggacaatgtttaaggtgttgttctatctcattctttttgtttgaaacagttaacatggtagaggcgtttttacaaggagcgtatgctataatagaaggatagaaaggaggccttcatgtttgcacaattggatacaaaatctgtctatagtttcatggatagtgttgtagatttgaccacctacattaagcgtgccaaagagcttggctatcaagcccttggtttgatggatcgtgacaatctctatgctgcttatcattttgctcagtttgcaagtagcaagggtttacgtcctttgattggtatggaagctaatctattttacgagggaagaaaaattccttttcgtctattagcaaaaaataatcagggctataaaaatttgatgaagttggcaacagagctctcctcagggcaacgcgagtttacagctttttcggactatctaaatgctattgccctcatccttccgagtgaagactgggagccagggatgactcttggttcagaggtttttattgggataaggccagaagatgctggcaaagagtttgattatcctgtaattcctttacatacagtgcgttattttgagaatgcagaccgctcgacgattcagatgttgcatgccatctcacaaaacgtttccttgtcagaggcctctatttgtcctatgaatcagcttcttttctcgcctcaagaaatggaaagtgcatatagtgatattccagaggctttgaacaatttggagcaacttgtttcagacattacttatcaatttgatacggatttgaagcttccccgttttaatcgtgatatgccagcagttgaccaattacgtcaattagcccaatctggattagaaacaaaaaagttaagcgaagcagtttatcaggaacgtttagacaaagaattgtctatcattcatcagatgggatttgatgattatttcttgattgtctgggacttattacgctttgggcgtagccgtggttattatatgggaatgggacgtgggtctgctgcaggaagcttggtggcttatgtccttgatattactggaattgatcccgttaaaaatgacttgctttttgagcgttttctaaatgaagaacgttatagcatgcctgatatagatatcgacttgcctgatatctatcgaagcgagtttcttcattatgttagggaccgttatggtagtaagcactctgctcagattgttactttttcaacttttggggccaaacaggctatccgagatgtttttaaacgtttcggagccaaggaatttgaactgtcacaacttagtaaaaagatttcttttcgtgacaccttgacctctgtctatgagaagaatatgtcatttagacagttgattaatcaaagacaagaatttcagagggcttttgagattgctaaggctattgaaggccagccaagacagacctcaatccatgctgctggtatagtgatgagtgacgatgacctaaccaaccatattcctctaaaagctggtgaggatatgatggttactcagtacgatgcctccgcggtcgaagccaacggcttgcttaagatggatttcttgggcctccgtaatttgacctttgttcaaaaaatgaaggagaaacttgaagaagagcagggagtcgctatagatatcaaatcaattgatttggaagatcctcagaccctagctctttttgccaagggtaaaactaagggaatatttcagtttgagcaggcgggtgctattaaccttcttaaacggattaaacccgctaagttcgaagaagtggtagcgacaacctctcttaaccgacctggagctagcgattatacagataatttcatcgctcgtaagtatggtaaggaaaaagtagatttgattgatccagtagttgcaccaatccttgagcctacgtatggtatcatgctttatcaggagcaggttatgcagattgcccaagtatttgcaggcttcacactcggaaaagccgatttgcttcgtcgggcaatgtcgaaaaaagatgccaatgaaatgtccaagatgtccgaagagttcatggaaggaagtcgtcggttgggacgtaacccacagattgctgaacgactctttagtatgatggctaagtttgcaggttatggctttaatagaagtcatgcctatgcttattcagcactagcctttcaattagcctatttcaaaacgcattaccctcagattttctatgacgtcatgttaaactattcgtctagtgattacattaaggatgcaattgaaaatggattttctatagccagccttgatattaatagaattccctatctggacaaaatttcagatggaaagattgtattaggtcttaagactatcaaaggcttgccaagagattttgccctttggattattgaggatcgcaaacaaaatggtaaatacatttctatagaagactttttgacacgtattcctagcaaatatcagaaagccgatagtctgacacctcttatccagattggtttgtttgatatttttgaaccaaatcgtcagaaaatcattggtaatttaagcaacctctttacttttgtcaatgagttaggaagtttgtttgcagagtcatcttactcttgggttgattatgaagactatagtcagacggatcgttataatttagaacaggagttactaggagttgggcttagcccccatcctttacacttggctcaaaaaatggcctctcgtccctatcaagccatttctgatttggctgttaatactaaggcaacagttttggttcagatagaatccgttcgaattatcagaactaaaaaaggtgatcagatggcctttctgaacgtcactgatgggatcaataaacttgatgttaccctatttccagaaacttatttctatcataaggataaattaagtgaaggtggtctcttttatcttgatggacggacccaagagcgtgatggacgcattcagttaatcttgtcaaatatggaggaagctagcacggagcgtttttggattttacttgaaaatcatgataaagacatagaagtttctcaaatattagctaagtatcctggacacattcctgtcattatccgttatcaaggaagtaaggaaaccatcgttagtcaaagatacagagtaactaagaacgaggaacttaatagggaattagcaccttatgtgctgaaaacggttttacggtaaaaaaacaataaatcttttcaaatttaaagccatttagaattctttgtgttataatgaaaatgttaaatatataaaaggagtatcaggaataatgaaacgtattgctgttttaactagtggtggagatgcccctggtatgaacgctgccgctcgtgcagttgttctcaaagcaatttctgaaggaattgaagtattcggcattaaccgtggatacgctggtatggttgaaggagatatcttccaacttgatgccaaaggcgtagacaacatcctcagccgtggtggaactttccttcagtctgctcgctaccctgagtttgcccaacttgagggtcaacttaaaggtattgagcaacttaaaaaacatggaatcgaaggtgtagtagttattggtggagatggttcttaccatggtgctatgcgtttgactgaacatgggttcccagctgttggtcttccaggaactatcgataatgatatcgttggtacagactatacaattggttttgatactgctgttgcaacagcaacagaagctatcgataagattcaagacactgctttcagtcacggacgtactttcgtcgttgaagttatgggacgtaacgctggtgatatcgctctttgggctggtattgcttctggtgcagaccaaattatcgtacctgaagaagagtatgatattaatgaagttgtacgtaaagttaaagaaggttacgaatcaggtgctaaaactcaccacgtaatcgtagttgctgaaggtgtcatgggtgctgaagaatttgcagctaaaatgaaagaagctggagatacttcagatcttcgtgcaacaaacattggacacgtggttcgtggtggttcaccaactgcgcgtgaccgtgttcttgcttcatggatgggggcacatgcggttgacctccttaaacaaggtattggtggtgtagctgttggtatccacaatgaagagcttgttgaaagcccaatccttggtacagcagaagaaggagctttgttcagtcttactgaagacggtaaaattatcgtcaacaatcctcacaaagcacgtcttgactttgcagaccttaaccgttcattgtctaacttgagctaatctcagttacttaaattattgttaatccgtcgctaatgcgacaaaaaatataagggagttttatttatcatgaataaacgtgtaaaaatcgttgcaacacttggtcctgcggttgaaatccgtggcggcaaaaaatttggtgaagatggttactggggtgaaaaacttgaccgtgaagcatctgctaaaaacattgctcaattgatcaaggaaggtgccaacgttttccgtttcaacttctcacatggtgaccacgctgaacaaggtgaacgtatggatgtcgttcgtatggcagaagaccttgctggtcaaaaagtaggtttccttcttgatacaaaaggacctgaaatccgtactgaattgttcgaaggtgatgctaaagagtatgcatacaagactggtgaacaaattcgtgttgctactaaacaaggtattaaatcaactcgcgacgttatcgctttgaacgttgcaggtgcacttgacgtttttgacgatgtagaagttggtaaacaagttcttgtcgatgatggtaaacttggtcttcgtgttgtagacaaagatgctgaaaaacgtgaattcatcgttcaagttgaaaatgatggtatcatcgctaaacaaaaaggtgtaaacatcccttacactaaaattcctttcccagcacttgctgaacgtgataacgctgatatccgttttggtcttgaacaaggtcttaactttatcgctatctcattcgtacgtactgcaaaagatgtacaagaagttcgtgctatctgtgaagaaactggtaatggtcacgttcaattgttggctaaaatcgaaaaccaacaaggtatcgataacattgatgaaatcatcgaagctgctgacggtattatgatcgctcgtggtgacatgggtatcgaagtaccattcgaaatggttccagtttaccaaaaaatgattatcaccaaagtaaacgctgctggtaaagttgttgttacagctactaacatgcttgaaacaatgacagataaaccacgtgcaactcgttctgaagtatctgacgtattcaacgcagttatcgatggtacagatgctacaatgctttctggtgaatctgcaaatggtaaatacccagttgaatcagttcgtacaatggctacaattgataaaaacgctcaaactcttcttaaagagtatggtcgtcttgattcatcaacatttgatcgttcaactaagactgaagtagttgcgtctgcagttaaagatgctactaactcaatggatatcaaacttgttgttgctcttactgaatcaggtaacactgctcgtttgatttctaaataccgtccagaagctgatatcttggctgtaacattcgatgaaattactcaaaaatcattgatgcttaactggggtgttattccagtagttactgaaaaaccaagctcaacagatgatatgtttgatgttgctgaaaaagttgcattggaatcaggtcttgtagaatctggtgataacattgttatcgttgctggtgttccagtaggtacaggtggtacaaacactatgcgtatccgcacagtaaaataatttaagtagaacttaaattgaaagaaggtctttggatcttctttttttggctctataatcgatttagtaggttaaactattgaagagattatagagttttttcgtaggtagctaaatcaattggataataataacaagtgaagaatatcatatttattccaaatggtttaaagcaagatggcttatttggtttgtattttcaacagatttagttctaagtgtcatatgacttagaaggtatttagagaagagggaaattattttttcaaagaaattttgcttttcttgaaaacaacaggataaaaatgtcgttaaataggcttctaaactatagttaagatggttataagctataatttttagaaggactgagttgataacaaaccattttaatttcaataatgacttactaatttaaaatatctaatgaattgttaattctgaaaatcgatttttgaaaaaaatgaaatcataagtttctttttactgacaattctaaaaataaataattataaaacctttcattaaaatacttataattaagtaatatatatacaattattttgttttttacttgattttatttaagtaaattttttaaaatatttgaaaatatgagcaaaacttttcacaaatattaggaattttgttagaatgtttaacgattagtatttttaaatacttttaatctcattgaggggtgagatacctaattgtttaagtgtggaggattaccaaagtgggtaaagatttatttaatgatcgtataagtcgattttcgattcgtaagttgaatgtaggcgtttgttcggtcttgcttggaacacttgttatggttggtactgctagtcaagtatctgccgatgaaacagctaaccaagtgcaagcaggagatgtaacaagcactactgcaacagtgagtgaagagtcatcttcacagactgctgttgctgctcaagcttcaacggaagtcgcaaatattttatctagtactgagactaatagtcagtctcaaactgtttcaaatgctagctcagctaattctgaaacgtcgacaacacaagcttctagtgaaacaacatctcaagcagcttcgtcaacgtcagcaactactgcagcatctaccactagtgttgctggctctacaagtgtaggcaatactacgggagtttcaacgacagcctctgttacatcagcatcatctgagacacctgcttcagaaacagcatctgaagcacaaggtgtggacgttcaagcagaagcttctacaacgaatgctctttcaagtggagccgaagcgtctgctgtagagcaacctgttgtaacagcagaaacttctggtcgacgtcgtacacgtcgtgcattaggtgatcctaatgacgaaagcttgattggggatgatgttgaagatgcaacttcaactccaaaagttgaaaaaccaggctttacaacaaatgttgatgccaaatctatggctagccaaatctcatggttggactttggagatgtagctaactggacaggaactactacagtactagttcctaaaagtgaagttaaaccaactgagaacttagaagaaaaattggctcttcaagttgggtctacctataccaaggaaattatgcctggttatgtagttactgtaaaagtcaaatccttgaaacctttccaagcgactgaaatctataagaaacggatggaaaatcaaggggctacagaagctgaaaaagcaacctatgatccaaatgcaaaaaatggttatgtaagtggagtcacttcaaatgctgctaggcaagcttttaacaatggtgaagaggccaaaatcgttgctgatgcccaaaataattggactgaaatcagatttgagaatattgatacgaaaaccaagaagactaccataagttcagctttgaatggtggaaatattggagttcagtttgaaatctctgcaaccttccgtggtaagacagttaagccagctattgttatggctgatggggagtctgctaacccaggtgaattagttatgtttactaccaatggagaaggttggcagcatattggagaatggaaaaagtttaccagaccaactacttctgtaacatattcaccacaagatactgaaaatctttttggacctaatcctaaatttaataataccaacttaaaccaacttcgtagatctactcaagttggaccagaaaagaaaccagtagcttggaagtattttggaaatcctgacaaagttacaggtggtctaggaaccggtatctttggaccaaacatttctgaaggtaattatactgttccaatcgttatgacgcgtggtgcctctgaagttggactttatgtcgcttcaggtggtaaacagtcagcaatgctaggattcttcccaattgatgaaggggacgctcctgagtcatacggaaaagctatgcataccattgcaactgtagatggtataactggtgctaaagtaaatcaaccatatattggtaatgtgagcccagatatggatgagaatactgttcttgactggttcggtgatgataaggcaactacggccgatgaaggaattgaccaattgcttccagatgagcttaaaggtacaaccaatgagatgatcaagatggatcgtacacgcccaggtaactacaagctgtcaatagaagcccatacagatggagcttcagaagcttatatctacggttggatagactttaaccaaaatggtacctttgatgaagatgaacgctctgatcttgcaagaatcacaaatgacggtacagttgagttgacttttgcaaatagcaagacttatatcgaccctagcgttaaagaactaggtgctcgtgttcgtattgccaagaaagctaacgagattgagagcccaactggtatggccctctcaggggaagtggaagacttcagaactcaaattacgcacccaccaaaagggaaattcaaggaaacaagtggtcctcaaggggcgaagcaaactgcaactgtaacctttacagcacgtggagaacacaagtatgagcttaattctagtgccgttattgacgaaacggtagaaccatacatcgttgataaagatggcaaccgtgctactcttgatggggacggttactatgtcgttccaggacaaggtaagtacaagattactgccaacggtaaagatgtcgatgttgaatttattcctgaagataacttccttggaacagctgatggtatttctatccgtcgttcagataacaacggttatgatactggttggtcaacaaaattcccagatcaagaaccaaacattaatggtcagttgaataccatggatggtcaatacgttccaacagtcactccaattgaaatcgaaggagttgacaaaacttcgacggatgttcaaggggcgactcaaaaagaaactccgacctttaacacaactgagactaactcaaatggtgacaagattgcaatcactccaagtgcagaatatcctgctaagttggtggatcctgccacaggtctcactactgatgcgccatctgtaacagttgaaggggaaggaacttatacgattaatccttcaacgggtgaagtaaccttcactccagatccaagctttactggtacagcaaaaggtgtggaagttacattgtcagcgccagttggtagaaacaaagatggtaagatccaacaggattacatcaagactgcaacagctaagtacacaccaacagtcacaccaatcacagtgactcctacagacaaggtttctgcggatgttcaaaacgttcctcaaacccaaacactaacctttgatttgagtaatgataagactgctgaaatcacaagcaagaaattggtggatccagcaactggtcaaccaactgatgaaacaactgtaacagtagcaggagaaggtagctatactatcgacccaacgactggagcagtaacatttacgccagaaaaagactttgttggtactgcaaaaggagtaactgttcaggcaacagctactattacaaatgctaacggtaagactgcaaccattacttcagatgcgacctacacaccaactgttgtagctgctgttccaacagctcaaccagctacatctaaagatgttcaaggtgcaacgcaaacagggacaccaacctttgcaggaactactgtccaagtaaacggtgaagataaagctattacaatcaaagataatagctacacgcttttggataatgatggcaatgaagtgacaagtacaccagcttatgctgctgatggtacaactgaaatcggtacttactctatcgattcagctactggtcaagtcactttcacaccgactgataaatcatacacaggtgtggtaactccagccaaggttcaagcggaaagttcaaacggtatcaaggtggatacaacatacacacctgaaatcgttccagtaacaccgacagcaacaccagctgaaactgaagatatccaaggtgcaacgcaaactggtaaacctgaatttaagggcggaactgtaacagtagatggcgttgagaaaacagtagcgattaatgaagctgttccagcgaccttcgatgatggttcaacgactaagacagtagacggcgttggtacttacacagtagcagcagacggaacagttacattcgtacctgaaaaatcattcgttggaactgcaccagcagtgacggttgttcgtgaagataagaacggaaccaaagcctctgcaacttatacaccaactgtgactccagtaactccaacggcaacaccagttgaaactacagatatccaaggtgctacacaaactggtaaacctgtatttactgagggtaatagccgtgtgccgatgaatgatgatgttgctgcaacatttgacgatggctcaacgactaagactgttgacggcgttggtacttacacagtggcagcagacggaaccgtaaccttcgttcctgagaaatcatttactggaacagcaccagcagtgacggttgttcgtgaagacatgaacggtactaaagcttctgcggcatatacaccaacagtaaccccagtaacaccgactgcagaagatacaacatctacaggtaaacaaggacaaacccaaacaggtaagcctaaatttactgaaggcaacagccgtgtgccaatgaatgatgacgttccagctacttttgatgatggttcaactaccaagacagtcgatggcgttggtacttacacggtggcttcagacggtacagttacattcgtccctgaaaaatcattcacaggtaaagcaccagccgtaacagttgttcgtgaagataagaacggaacaaaagcttctgcaacttacacaccaactgtaactccagtaactccaactgcaacacctgctgaatctactggacctcaaggtttggttcaaacaggtacagtaaccttcactgaaggtgatgaagtagcaccaatcgacaaggataccattactcttcttgatgaaaatggtcaaccagcaacatctgtagttgctaagtcaccagaaggtaaagaaattggtaccttcaccgttgataaagatacaggtgttgtgaccttcacaccaacggataaatcttattccggcgatgttgtcccagttaaggttcaagctgcggatactaacggtacaacagtagaaacaacttacacacctaagattactccagttgttccaacatctgaagatgctacatcaactgatatccaaggtcaaactcaaacaggtaaaccaaccttcacggaaggcaatccaaatgttccaattgatgaggatacaccagctaccttcgatgatggatctacttctaagactgttgatggcgttggtacttatacagtagctgcagacggaactgtaacatttgttccagaaccaagctttactggtactgcaccagctgtaacagtagttcgtgaagataagaacggaactaaagcatctgcaacttacacaccaactgttaatccagtcactcttactccaacaaataaagtttctgaagacattcaaaatattcctcaaactgaaactccaacatttgctttgagtgatgatgagactgctcaaattacaagtaagaaattgattgaccctgcaacaggtcaaccaacagatgaaacaactgtaacagtagcaggtgaaggtacttacacaatcgatcctactaccggagcagtaacctttactcctgaaaaagactttgtcggaactgcaactggcgtgaaaattcaagcaatagcgacgattacaaatgaagatggtaagacttcaaccatcacttcagatgcaagttacacaccaacagttgtagcagctgttccaacagctaaaccagctacatctaaagatatccaaggtgcgacacaaactggaacaccaacctttgaaggtgcaactgttcaagtaaatggtcaagataaagctattacaatcaaagataatagctacacacttttggacaaagatggtaatgaagtggcgactacgccagcctatgctgaagatggtacaactgaaatcggtacgtactcaattgatccagcaactggacaagtgaccttcacaccaactgataaatcttatacaggtaaggtaacgcctgttaaggttcaagctgaaagctcaaatggcatcaaggtggatacaacctacacacctgaaattgttccagtaaccccaacagctacaccagctgaaacaacggatattcaaggtgctactcaaacaggtaagcctgaatttactgaaggcgacagccgtgtaccaatgaacgatgatgttccagctactttcgacgatggctcaacgactaagacagtagacggcgttggtacttacacagtagcagcagacggaacggtaacctttgttcctgagaaatcattcacaggtaaagcaccagccgtaacggttgttcgtgaagataagaacggaaccaaagcttctgcaacttacacaccaactgtaactccagtaactccaacagcgacaccagttgaaacaacaggtaagcaaggtcaaactcaaacaggtaagcctgaatttactgaaggcgacagccgtgtaccaatgaacgatgatgttccagctactttcgacgatggctcaacgactaagacagtagacggcgttggtacttacacagtagcagcagacggaacggtaacctttgttcctgagaaatcattcacaggtaaagcaccagccgtaacggttgttcgtgaagataagaacggaaccaaagcttctgcaacttacacaccaactgtaactccagtaactccaacagcaacaccagctgaatctactggacctcaaggtcttgttcaaactggaactgtaacctttactgaaggtgatgaagtagcgccaattgacaagaataccattactcttcttgatgaaaatggtcaaccagcagcatcagtagaagcgaaatcaccagcaggtgacgtgatcggtaccttcactgttgataaagaaacaggtgttgtgaccttcaccccaacggataaatcttattcaggtgatgttgtcccagttaaggttcaagcagctgatacaaatggtacaatagtagaaacaacttacacacctaagattactccagtcgttccaacttctgaagatgcaacaacgacagatatccaaggtgccactcaaacaggtaaaccaaccttcaccgaaggaaacccaaatgttccaatcgatgaagatactccagctaccttcgaagatggctcaactacgaagactgtcgatggtgaaggaacttacaccgtttctccagatggaacagtaaccttcgttcctgaaaaatcattcactggaactgctacaggcgtaaaagtgaaacgcgtggataagaacggtactgaaattacagcgaagtatacaccaacagtaactccagtaactccaactgcaacaccagttgaaactacagatatccaaggtgctacacaaacaggtaagccagtatttacagaaggcgatagccgtgtgccaatgaacgatgatgttccagcaacatttgacgatggctctacgactaagactgtagacggtgttggtacttacacagtagcagcagatggaacagtaaccttcgtaccagaaaaatcattcgtcggtactgcaccagctgtaacagtggttcgtgaagataagaacggaaccaaagcttctgcaacttatacaccaaccgtaacaccagttacaccaactgcagaagatacaacatctactgacaaacaaggtcaaacgcaaacaggtacaccaaccttcacaccaggtaatccaaatgttccaatggatgatgatacacctgcaacatttgaagatggctcaacaaccaagaacattccaggtgaaggaacttacactgttgctccagacggaaccgtaacatttgttccagaaaaatcattcacaggaacaggtacaggcgtaactgtgaaacgtgttgataagaatggtacaccagttacagctaagtacacaccaactgtaactccagtaactcctacagcaactccagctgaatcagaagcccctcaaggtgtggttcaaactggaactgtaaccttcacagaaggtgatccagttgcgccaatcgacaaagataccattactcttcttgatgaaaatggccaaccagcagcatcagtagatgcgaaatcaccaacaggtgatgtgatcggtaccttcacagttgataaagaaactggtgttgtaaccttcacaccaactgataaatcatactcaggtgaagtcgttccagttaaagttcaagccaaagacacaaacggaactgttgctgaaacaacctacacacctaagattactccggttgtaccaactgctgaccctgcaacatctacagatatccaaggtaaaactcaaacaggtacaccaagcttcaaacctggtaaccctgcaatcccaatggatgatgatgttccagcaacctttgaagatggaacaactacgaagaccattccaggcgaaggaacttacacagttgctccagacagaacagtaaccttcgtaccagaaaaatcattcacaggaacaggtacaggtgtaaccgtgaaacgtgttgataagaacggtactccagttactgcaacatacacaccaactgtaactccagttacaccaactgctgaaccaacaacatcaacaggtaaacaaggtcaaactcaaacaggtaagcctgaatttactgaaggtgacagccgtgtaccaatgaacgatgatgttccagcaaccttcgaagatggcacaacgactaagacagttgacggtgtcggtacatacacagtagcagcggacggaactgtaacctttgttccagaaaaatcattcgtcggaactgcaccagcagtgactgttgttcgtgaagatgtaaatggtactaaggcttcagcgacttacacaccaaccgtaacttcagtcacaccgactgcaacaccggcagaatcaacaggacctcaaggagtagttcagacgggaactgtaacctttactgagggtgattcagttgctccaattgacaaagatactattacccttcttgatgaaaatggccaaccagcagcggcggtgtttgcgaaatcaccagcgggcaatattattggtaccttcacagttgataaagacacaggtgtcgtaaccttcacaccaacggataaatcttattcaggtgatgttgtcccagttaaagttcaagcagctgatacaaatggaacaacagtagaaacaacatacacacctaagattactccagtcgctccaacatctgaagatgcgacatcaacagatatccaaggtgcaacacaaacaggtaaaccaagcttcaccgaaggaaatccaaatgttccaatcgatgaagatactccagctactttcgaagatggctcaacgactaagacagtagatggtgaaggaacatacactgtttctccagatggaaccgtaactttcgttccagaaaaatcattcactggaactgcttcaggcgtaacggttaaacgtgttgataagaacggtactgagatcacagctaagtacacaccaactgtgacaccagtaactccaactgcaacaccagctgaatcaactgatatccaaggtgctacacaaactggtaagcctgaatttactgaaggtgacagccgtgtgcctatgaacgatgatgttccagcaactttcgacgatggtacaactaccaaggcagtagagggtgttggtacttacacagtagcggcagatggaaccgtaaccttcgtacctgagaaatcattcgttggtgaagctccagcagtgacagttgtccgtgaagataagaacggcacaaaagcttctgcgacttatactccaaaagtaactcctgttacaccaactgcagcaccaacaacatcaacagatattcaaggtgcgactcaaacaggtaagcctaaatttactgaaggtgatagccgtgtgccaatgaacgatgacgttccagcaaccttcgatgatggttcaaccactaagacagtagaaggtgttggtacttacacagtagccgcagacggtacagtgacatttgtaccagaaaaatcattcgttggaactgccccagcagtgacagttgttcgtgaagatgttaacggcaaaaaagcctcagcaacctacacaccaactgtaactcctgtaacaccaactgctgagccagcaacatctatagacattcaaggtcaaatccaaacaggtaaaccaagcttcatgcctggtaacccaagtgtaccaatggatgatgctgttccagcaacctttgaagatggctcaactaccaagactattccaggtgaaggaacttacaccgtttctccagacggaacagtaacctttgttccagaaaaatcattcgttggaactgccccagcagtgacagttgttcgtgaagatgttaacggcaaaaaagcctcagcaacctacacgccaacagtaacaccagtaacaccaactgcagaatcagttacctcaattggaaataaaggccaaacgcaaacaggtaagccagtatttacagaaggcgatagccgtgtaccaatgaataaccaagtaccagctacctttgaagatggctcaacaactaagactattgcaggtgtaggaacttacacagtagctgcagatggcactgtaacattcacaccagaaactgaatttacaggaactgccccagcagtcacagtggttcgtgaagatgttaacggaactaaggcttcagcaacctacacaccaactgtccttccaatcactaagtttgttgataaagaaggtaaggaaatcccaggatatcctacagttgatggtgaacagccaaaagttgaaattccaggttaccgcttcgtagaaactaagaaattacctaatggtgatatcgaacatgtctacgagcaagtaacgacgtcatacgttgatgaaaatggtacgccaatccctggttatccaactgaagatggccaacaacctaagaaagaaatcccaggttatgaatttgtgaagacaattgtagatgaaaatggtaatactcaacacatctacaaacaaattgtgactccaacaccagtgccggataaaactccgacaccagagccacagccagctccacaaacagaagagcctaaggctccagtacttccagaaacaaaagaagaagctcactttatcaatccaagtgataagacagctcaacttccagaaactggtagtgaggattcaaaccttgcaatctttggtttggcaagtcttctagctggatttggactctatggcgcaaaacgacgcaaacgttaagatgatttaacggtcggataggagaccttaagaatccagattccaattaaaatagacctcatggcatttgccatggggtctatttgtatggactagcctgctagtttttttaagacgtcatgattgactttactctctaggaagcgtaatctagactttaattaaaggattaaaaggaggtccctcgatgattgaagtaacttatttaaatactgcaaagcaagaaaaacacacttcttttgaagattacaatgaatttgtcagagcacagcaagcttgttggattgccttaccggattcaacgccagtcactaaggtgacgataaacggacatgatattggctacaaaggacaatatggtgacctttacttttatattatgaagctagacttggcacaatatcagtaataataggaaaaagaatcagacattgtgttctgattctttttctttgagaaaggtaatttttataaattaagaatattgctaattgactgaaaatgacttacaatagaaaggaagaatttatagaaggagacacatatgaaaaacaagcgtttaatttggactttggttttcttagctatcttgacgctcggttctattggtacagatcttttcaaaaaagaacaccaagatgccaataaggtcgtcaaagtagggatcctccagttcgtgactcacgacgccctggatcaaatcgagaagggaattgaggatggccttaaggaagctggttataagggggacaaggttaaaatcaccctcctaaatgccgaaggagaccagtctaaaattcaaaccatgtctaaacaattggttaatgacaagaacgatgtcgttatcggtattgccacaccagcagcacaggggctagcggcagctaccaaggatattccagtaatcatgggggctatctcagaccctgttggggcaaaattggttaagaatctcaaacatccggaaggcaatgtcactggtacctctaaccaagtgccgattaagcagacagtagaattggtcaaatcactgacaccaaatgccaaaacgattggtattctctatgcttcaagtgaggacaattccaaatcacaggttgaaagctttaagaaatacgctgaaaaagatggtctaaatgtggtcgagtacgccgtcccatcaaccaatgaaatcaatacaaccatgtcagtcatgactggtaaggtagatgccatctggacgcctcaagataatactattgcctcagccttttcaacagtaatctcatcagccaaccaggctaagattccagtttatacgacagttgatacgatggtgaaagagggcggtttggcttcagttgctcaaagccaatatgaacttggaaaggctacagctcgtagtgccgttaaggttcttaaaggtaaaaaagttaaggatgtccctgtagatgttatcgatgatggcacaccaacacttaaccttaaagttgctcaagacctcaacatcaccatccctgacgatgtgcttaaacagtcagatatcgctgttaaagctgataaataaggaggacttatgattatttcatctatttatcaggggcttctatacggaatcctaggtcttgggatttacatgactttccgtatcttggattttcctgatttgacaacagaaggttccttccctcttggtggggcagtagcagtaacccttatgaactttggttggaacccaattttagcaaccttggttgccgttttggccggctgtggtgctggacttgtgactggtctcctctatactaagggagaaattcctactattttggcagggattttggtcatgacctctcttaactcagtcatgcttatgattatggggagggccaacctgggacttctagatatcaagactatccaagatttgcttcctttcagcaaggactacaatctcttgattgttggtctcattgctgtgaccattgttatcactgccttgattgcctttcttaacacgcgcctaggtcaagcttatattgccacaggtgataatagagacatggccaaatcttttggtatcaatacagacaatatggaagtgatgggtctcgttatctcaaacggtatcattgccctttcaggagccttgattagccaacaggacggttatgccgacgtttctaaagggattggggttatcgtcattggtcttgccagcatcatcattggtgaggtcctttatgcgactaacttgactctgttggaacgtttgattgccatctgtattggttcaatcctctatcagttccttttgacagcggttattgctcttggttttaacacaaactacctcaaactctttagtgcaattgttttggctatttgtttgatttcgcctgttctacgccgaaaattctttaagggggtgaccttatcacgatgacagctattgtagaacttaaaaatgcgactgttaaggtcaataacggttttgacaccaaaaaaaccatcctggaccatgtcaaccttaccattagagaaggtgactttattaccattcttggtggaaatggtgccgggaaatcaaccctcttcaatgtcattgcagggaccctcatgttgaccagtggtcagattttcatcatgggtgaggatgttacgtctctccctgctgagaagcgtgctaagtacctctcacgagtcttccaagatcctaaaatggggacagctcctcgtatgactgttgcagaaaacctcttaattgccaaataccgtggcgaaaaacgaggccttaaatcacgccaaattcatctctacacagaggaatttcaaggtctgatcgaacgtatcagtaatggtttagaaaagcacttagatacaccagcaggtctcctttcaggtggtcagcgtcaggctctcagtctgttgatggcgacacttaaacgtcctgagctcttgctcttagacgagcacactgcagccctggatcctaagaccagtgtagccctcatggagttgactgatgagtttgtgacgggcgaccatcttacagccttgatgattacccatcacatggaagatgccctaaaatatggcaatcgtttgatcgttatgaaggatggtcaaatcattaaagaccttaccaaggaagaaaaaggtcaattggatatcacagactattacgctatgtttgagtaagtctcgtctgactctaaattgtaaaataagctaaaaagttgtatacttaaagagtatgcaactttttgttgtggcctgtaaatcgacaaggagactgttcgcacgaacgttcagcttcttggaccgtctgtaaaaataggctctagaagagagtcaaactaaaaaggagaaaaacaagcatgagcgatattaaaattattgccctaggtggagtacgtgaaaatgctaagaacctctatattgttgagattaacgactctatctttatcttggatgctggtctaaagtatcctgaaaatgaacaactaggtgttgactttgtcattcctaacttagattacttgattgaaaatagagatcgtatccaagggattttcttgactcacggacatgctgatgccattggtgccctaccttatatcttgcaagacgtcaaagtaccagtctttgggtcatcacttactattgagttggctaagctttttgtaaaaaatgctggcgttaagaaattcaataacttccatgttattgatgcagaaactgaaattgaatttgaagatgctgaagtttcattcttcaaaacaacgcactctattccagaatcaatggggattgttcttggcactgaccaaggtaatattgtctatactggtgacttcaagtttgaccaagctgcccgtccttactacaaaactgatttaggtcgtttggctgaaattggacgtgaaggtgttttggccctcttgtcagactcagcaaatgcgacaagtactgaacaaacagcttcggaagcagaagttggtcaagaaattgaccaagtcattgccgatgcagaaggacgtgttattgttgctgcagttgcctcaaacttggtacgtattcaacaagtcttcgattcagctgctgatcacggacgtcgcgttgttcttactggttttgacgttgaaaatattgttcgcacagccatccgtctcaaaaaattgactgtggagcatgaaaaacttattgtcaaaccaaaagacatgaacaagtttgaagaccacgagttgattatcctcgaaaatggtcgtatgggtgaaccaatcgatggccttcaaaagatggctgttggtcgtcaccgttacgttcaaatcaaggatggagatttggtttatatcgttacaactccaagcattgctaaggaagccgtagtggcacgtgtcaacaacgctatctataaagctggtggaactgttaagatgattacgcagagccttcgtgtttctggacatgccaatgctcgcgaacttcaattgatgattaacctccttcgtccacagtatctcttccctgtccaaggggagtaccgtgaccttcaagcacatgcagagttagccttggaagttggtattcttccagaaaatatttatatcgttaaacgcggtgacatcatgcacttgtcagaggatcaaggtttccttcatgaaggagctgtcccagctggtgatgttatgattgatggtaatgccattggtgatgtgggtaatatcgtccttcgtgaccgtaaggtcttgtctgaagatggtatctttatcgtagctatcactgttaacaagaaggaacgtaagattgtctctaaagcgcgtgtgaatacacgtgggttcgtttatgtgaagaagagccgtgatattctccgtgaggctgctgacattgttaatgctaccgttgaaaattacttggcaggagacagcttcgactggggtgaacttaaaggtgctgtccgagacgatgtggctaagttcctcttcgaccaaaccaaacgtcgcccagctatccttccagttgtcatggaagtccgctaataactgactaaaacataagagtgtgagcgtgtcgcttgcaccatagacattgaggaaagttttaacaagactttgttctaaaatcaaaagctgggggtgtcccagcttttctaacattaagaaaggaaaaacaaatggctttttttcaaattgaatactcatcagatgttctaggacaataccgccaagtggatgtcatctatccagatcgtgatcagattgctgaaacggaaagtgatacggacatcccagttctctatctccttcatggcatggggggcaatcataattcttgggccttccgtaccaatattcagcgtctccttcgtaagactaatctcattgttattatgcctaattctgaaaatggctggtatacaaataccaattacggggttaagtattacgatgccattgctaaggagcttcctcaagtcatgcaacgtttcttccctagtatgactaagaagcgtgaaaagacctttatcgctggactttctatgggtggctatggttctttcaaactagccttaacgacaaataactttgcttgtgcgggttccttctctggtgcccttggattatcagtagagatgattacagatgaaacgagtgagtctaaggaatactggcaaggagtctttggcgatttggaaggaaaagacattaagcagcataaactggttaacctagccaaacaacatgataagaaaaccaaattctttgcctggtgtggcctcgaggatttcctttttgattctcaagataaggcagttgctgatttgaaggcccttggtttagacattgactacagcacagaccatggaagacatgagtggtattactgggaaaaacaactagaagcctacttagaatggttacctattgattacgttaaagaagaacgcttgtcttaataggtcaagtttgtaacatcttatcaaagagatgataaaagcttaaagtgatattttttgcttgtcagaactattagagcttgatatactaggggaagtttcgaaaaggaggctcaataatgaaaaaattattcagagtaatcttctatattcccaaacttcttttacaatttatttggaatcttatttgggctatatttaaacttgccctagtcctagcccttattggttatggactcgtctactatgccaataattcttcaagtaccttagccacaaacattaaccaagcctttcatcaagtagagctaggttttagtggaaccagtactagtgacgttgagaaagttgtctctaacctatcaacgacagataccattccagagtctaatggagctagatgggcacaaaatacagctagcatctatattcagtctaccgatgaaaccttggtagctgcttataaggaggctatcaccaactggaataacacgggtgctttcatctttactttaactgatgatgcctcaacagctgacattgttgcgactgactattccgatgtgaattcacaggcagcaggtttagcagacactcaaaccaatgttttgaccaatcgcatcactcatgtagatgtgaagttgaaccgttatttcctcttgaatagtgattttggttatactcacaagcgtattgtgaatacggctgaacacgaattgggacatgccattggcttagaccatgatgactctaagacatccgttatgcaatcagcaggatcttattacgggattcaacaggtggatattgatacggtccatgctctttatgctaattaaggaggggctgtcatgcgctatttgaaacgccttgctagacgttaccccatgcaaaccttcctttttcttttcaatgctggggtctttacttggttgcaaacaacaggaaccatgattgccaatcgtttgggcctatcaggtgaaggtatttggatttatattcccaattgggtaaaaatgctgaccagccattctattgagagtattcaaaccctatacggggcctctggttggagttggctaatcacctctatgcttcttacttggctcttgacttttctgagaggtctcatgagagcagtgattctcattctgatagttggtcttggcttatggctagtttatcgacactttgaactcttacaaaatctaaaactgtcctgatgggcagtttttttgagttgttaggtcatttattttctgaagaaatatgatataatatagctaatttattattttggaggacattatggctttagcaaaaatcgtttatgccagtatgaccggtaacacggaagaaatcgcagatatcgttgccaaaaaattggaagaattgggtcacactgtagatgtagacgagtgtacaacggttgatgccgctgattttgaagatgcggacatctgtatcgtagcgacttacacttatggtgatggtgagttgccagatgaaatcgttgacttttacgaagatttggctgacctcgacttgtcaggtaaaatctttggtgttgtaggttcaggagataccttctacgattatttctgtcattcagtggatgagtttgaaaatcaattcacattcacaggggcgactaagggtgctgatagcgtcaaggttgacctttctgctgaagatgaagatatcgaaaaccttgaagctttcgctgaaaaagtttcagaagcattagcataagaaaaaagcagagtaaagtctgcttttattgtagtcaaaaatggagttttttatgaatgaaatagaaagagattttaggacgcaatctcaacatctcctttggtccgtttggcgagggctcttagtgggggtgacagcaggagcagtggtcagtctttttcgttggttaattgccaaaggggccgcattttctgtagctatttacgaagacgcccttcataatccacttctgattctgggaattgtacttgttaatctcttgattgccctttttattggttaccttattaagcaggaaaaagacatcaagggctcagggattccccatgttgaaggggaactgatggggctcctacatccgtcctggtggtcagtattatggcgtaaattcctaggtggagtccttgggatttcaatgggactgatgttaggacgtgagggacctagtattcaactaggtgccatgactgctaagggattagccaagggacttaagctctctgcacgtgagaagcgtgtcttgattgctgctggagcagcagcagggttatcggctgcctttaatgccccgattgctggtcttttgtttgtcgtcgaagaagtctatcatcatttctctcgtcatgtttgggtgacagctttaacggcatccttagtagccaatgctgtttccctacgcatctttggtcaggtaccggtccttgctatgacagaaaaattacccgtatttcctttgaaagattattggattcttattgttttggggatttttctaggtgttcttggatacggttatgagtgggttgtcttacgtattggtaaggtctaccaagggttagggaaaatctttcacttgccatctcattttcatggccttttggcagttctgtttatcattcctattggtctttatttcccacatcttttaggtggtgggaatgaattgattcttgctttaaatggtttacatcctgctctaactgtggctatcctctatttggctattcgctttatttggagtatgttgtcctttggttcaggttttcctggtgggattttcttgccgattttgactctaggtgctctttctggtagcgtatttgcggcagcttttgaaaatctaggattcttacaagtcagtcagttccctatttttatcattcttggtatggctggttatttcggtgcggtatctaaggcaccgctcactgctatgattttagtgactgagatggtgggtgaccttcaccaattgatgacaattggagttgtgaccctgattgcctatcttgtcatggatttcatgggaggagaacccgtctatgaagccatgcttcacaatctgattgcccacgaaccaaaacaagttgataatataccgacgatgattgatttaccagttacagagagtttagctggtcgcttggttaaggatttaaccttacctgacggggttttgatttccactcagatttttcaagaccagtctgaggttgttcgtggagacacacgtctaaaagcaggagcaaccttatatttggttgttaatgaaagtaatatcagtcaggtaagaaaactctttttataagcaattcaatggcttgaggctcttttgtcctcaggtcatttttgttataatgaagagaaaaaaggaggtcagtatggacttaaatgagattcgccaacagattgacacagttgataatgagattgtggccttgttggaagaacgtatgaaattagtaactcgagttagtgcttttaaacagcgcactggaaaggcgatctatgatcctgagcgtgagcaagccttgctagataaagtagcagcgagtgtcgcaaatccagagtaccaagagcctatcgtagctagctttgcagatattatgaaacattcacgcacttatcaagcaggcaagattgaaggaaagtaggttattaagatgaaagttagacaattaagtgagagtcaaggtctctcatactccaatttagtgattttaagtctctatgctgtctttctaggagtgatagttgggctgattgatgctatttttgggcgcgtgcttataggactctcggaataccgtgaccagcatatcttttatctggtcccagcacttcctttagcaggccttttgatagtttacctttaccaaaagcttgctggcaaggcagcacagggaatgggattgattttcaaggtaggacataatgaggaggatcaagtccccctaaggttaattccacttgtgactgtgaccacatggctgacccacctattcgggggatctgcaggtcgtgagggagtggctgttcagctcggagccacagtttcccatgcttttagtcgctactttaagctccctaatgcttcacgcattttcttaaccatggggatggcagctgggtttggagggctcttccaaacaccaatcgccgcgaccttctttgctcttgaagtcttgaccttaggacagttaagcctgccaatcttagtaccgactcttattgcatcttttgtggctagtacaacaagccatctcttaggtcttgaaaaatttagccactttgtatccgaaagtttgactattgaccttgagacgtttatgaaattagctcttttaggtctggcctttggtctagtaggaaatctctttgcttatctcttgtcactagctaaaaagaaagtagcaagtctgctcccaaatccttattatcgtgttctcttaggaagtgtcgtcttaacctgtcttcttttgattttgtggaagggacgttatacaggtcttggaacgaatttgattgctttaagtgttggtggtgggaccatttatccattggattggctcttgaaattgctcttgaccgtctttaccctatctcttggtttccaaggaggagaagtaacccctttgtttgctatcggagcaagtcttggtgctgttctagcaccagttctgggacttccaattccacttgtagcaggtctaggctatctgtctgtctttggtagcagtaccaatacccttttagcccctattttcattggcgttgaagtctttggtcccgctaatgcagtcccttacgcgattgtcatggcttttgcttatctcataaatcataagacgagcatttatggacaacaaaaaatgctagaaatgcaataagatactagacatcctgataattttttgataagatactaagagtgtgtaatggacacacaaaaataacggctaatccgctgagacacagaggttgctcttaagattagtaagataggagtatataaaaatgaatccattgatccaaagtttgacagaaggtcaacttcgtactgacatcccatcattccgtcctggtgacacagttcgcgttcacgcgaaagttgtcgaaggaactcgcgaacgtatccagatctttgaaggtgtagttatttcacgcaaaggtcaagggatctcagaaatgtacacagttcgtaaaatttcaagcggtatcggtgtagaacgtactttcccaatccacactccacgtgttgaaaagattgaagttgtacgctacggtaaagtccgccgtgctaaactttactacttgcgtgctttgcaaggtaaagctgcacgtatcaaagaaatccgtaaataatttacagatttcaccgaaaaaatctgtcctcgtggcagattttttcataagtcctcttagttaaatggatataacaactccctcctaaggagtcgttgctggttcgattccggcaggggacatttttaagcctttaaccatgcggttttaagctatcttgccccaaattgaagccaaatgtacttgacgcctattgaattataggtgtttttttgataagcaaaaaccctagtcaggattagtcctaactagggttcaaaatagaatactggtgatgattagtagtctgttatctcattaattggaattggcacttgtatctgtacttgatgatgctcgtgggtactcgtaaggagtgttatcaacgtcgtcaacccactcattgctctgatcagttgagcttgcgggattgcttcctccaccagcacctgcggcgaaggctgcatcgtgaccaccaccgcctcctccgttagtggcataagagccatcttctggcccgccccaacctcgtccgccttcagcaggcttggatttatcttgatttccatcttgatgaggtgtttggttgttttgtttttgatttgcttcttgagcagaaggagatgcttgatgcttattttcgtccttagcctccttcttatgatcttccgtcgaagtagctcttgatgatttagtattctcttttttatgagatgagctactttttgatgaaaggctgtgagagatgtgatgcgtttttgcagctggctttacaggttcttttaaatgttttgataaaaaaccgaagagaaagaagaaagctagcaaagagaaggtgatgatattatatttttttcttttcaaatttggctccgttcctagtcatagatgaagagtaaaaataacagtaaaaaaccaggtttccctggttctcattattagcggcttacacgacggcgagctgcttttttacggttttcttcgatgaaagccaatttcttttcttctggttcgataatagttttcttaactgcgaagacagcacctgctacagtagcagcagttccgataacgccagtagcgacacctttagcgaatgaatgttttttagccatgagactatcctccgtatatgttataatatgcttatattatctaaaaaaatatctagaatagcaagtgaaaacattatgaaaaccaaacttattgtagtagctggtcctactgctgtgggaaaaacagcgcttggaattgaattggccaagcgttttaatggcgaaattatttcaggagatagccagcaggtttaccgacaattgaatataggaaccgccaaggccactcctgaagagcaggcagctgcagtacatcatctgattgatgttcgcgatgttgatgagacctattcagcttatgattttgtgacagaggcagaggctgccattacagatatcgttagtcgtggtaagctgcctattgtagtaggaggaacaggtctctatttacaaagccttctagaagggtatcacttagggggacaggtagatcaggagcaggtcttagtctatcgcacggaattagagcaattatctgatcaggaactttttgacaagattgatcgtttaggtattgaaattaaagagattaaccgtcgtcgtgccattagagcacttgagctttatcgtttttcggagaatcttgaaaatactgagacgacttatgatccctatcttatcggattagatgatgaacgttccttgatctatgaccgcatcaatacacgagtagataagatggttgaacatggtctcttggaagaggccaagtggctgtacgataattatcctgatgcccagtcagctcgtggtataggctacaaggagttgtttccttattttgctgggaaccagagcttggacgaagccttggaaaaactcaagcaaaatacgcgtcgatttgctaaacgtcaattaacttggttcagaaatcgaatgactgttaagttttatcagatttctagtccagaatatcctgaaaatgtcgttcaagatcttgaattatttttaaatgaaagggaaggagaaaaggtaggtcaatcttagttttaagaaccaatctttgctataatggtagttatgactaacgaagaaaaaaaatcagcctatgaattaatgctagcacaggctaaggtgctttttgccaatgaagacaatgctttggccaacttttctaatgcctcagctctcttgaatacaaccctgccaaattctgtgttcacaggcttctacctgatggataatgtcaagaatgagttaatccttggtcctttccaaggtaatgtttcttgtgttcgaattgccctaggtaagggtgtttgtggccagtctgcagctgaaaatagaaccctaattgtcgaagatgtcaccaaacacgacaattacatcgcttgtgattccgctgctcgaagtgaaattgttgtaccaatggtaaaagatggcaaattagttggtgttctcgatttggattctcaccaagtaggagactataacgatgtagaccaagattatcttgaagcatttgtcaaaattctactcgagaaaaccgagcttacatttggaatgtttgaggtaaactaatgtatcaagccttatatcgtaaataccgtagtcagacctttggcgaaatggttggtcaaaaagtgatttcaaccacgctcagacaggcggtagagtcagagaaaatcagccatgcctatctcttttctgggccacgtggtaccggtaaaaccagtgcagcaaaaatctttgccaaggctatgaactgtcctaatcaagttgatggtgagccttgtaatcactgcgatatttgtcgcgatattacaaacggaagtctcgaagatgttatcgaaattgatgcggcttccaataatggtgtagatgagattcgtgagattcgtgataagtcaacctatgccccaagtcgtgcgacttacaaggtctatattatcgacgaagtgcacatgctttcgacaggtgccttcaatgctcttttgaagactttggaagaaccaactgaaaatgttgtttttattctggcgaccactgaattacataagattcctgcaaccatcctttctcgtgtccaacgttttgagtttaaatcaatcaagcagggagctattaaagagcatttggcttcaattctggaaaaagaaggattaacctttgatgatgaggctttgaccattattgctcgtcgtgctgaaggtggtatgcgtgatgctttgtcaatcttagaccaagcactgagtctttctcctgacaatcatgtcagccaagctgtagctgaagaaatcactggttctattggtttgacagctttagatagttttgtcgctaacgttcgcaatcaagagactacgcaagctttatcaaatcttgaaactctttttgataatggtaagtctatgagccgttttgcgacggatctcttggagtatttccgtgatcttttgattgtcaaagcgggcggagagaacagtcaccatagtcccctttttgaggagaatctttctctggagcaagaccgacttttccaattgattgacttggttacaagtgccttgccagaaattaaaactggaacacatcctaaaatctatgcggaaatgctgactataaaattgtcagagactcatactcaggtttcacaagaaattccagggaatttacaagaagagttagatagtcttcgtcgcgaggtagaaggtctacgtaaagctcttaaagagggcaaagtccaaggagaagtagcaccaactcgaaaagccaaacctgcttatcagtacaaggtggatcgtgaaaagattctcacgattatgcgtgaaaccatggaaaatcctcagaaatcacgccagtgtctggatgccctaaaggcaacttggcctgaaatcttggattctattagcccacaaaatagggcacttttgaatggctcagagcctgtattagccaatcaggaaaatgccatcctagcctttaatgctgcctttaatgctgaacaggtcatgaaacgcagtgatctcaatgatatgtttggtaatatcatgagttcagctgccggtttctcacctaatattatggctgttccaaaagcagaatttgaaaaactccgcacagaatttgcacgaagtctcaaatccaaagaagaattagaaaaagaagatcgtgaagagtatatccctcaagaactcgagtttctctctgatgtagtagaaatagaggactaaaaaggtccagtggacctttttaggtccgagccaagaaacacaaaagcgaggaggtccagtggacctttttaggtccgagccaagaaacacaaaagcgaggaggtccagtgtaatttgatagatttctgaagctgttccatccgtgtaaaaatgaaaagagcctagactgcttgtcctaggctctatctattgatataataatcttatgattcaacaaattttgtttattacgcttgaaactatttttgaaacggtttgttttaattacagtttacagcacggctattacttttttacagccttttttggttatttactgtttcgtcgtctttggacaacttacgttgtttcacgcattgcgcgtgcagccgacaagtctaccaagaagtaaggctcacttcgccagcggtcaaccatttttcctgaccatcatcagtaaaaacgagaagttggcccttatcgccaatttccttggcaataccagtataagtccttccagcttgttcaaaggtcacttgtttgtctaaaacgagggacttttctttataaactttgaccaaatcgctagtaggaatggttaaaaagagtttccaaatttctgaaatgagctggtttcgagtgatgcttggtttttcagaagtaaaaagactagtagctttattagctaactcttcagggaaatcagtgattgagaagttaagcccaatcccgataatgacatctgtgatgcgaccagattcgatagaactaatggcttcggtaaggataccagccatttttttgttgttgaggtagatgtcattaacccatttgatttctgtattgatgccggttagacgctggatagctttgacaatagcagctgccaccatcatcgtataagggggtaactcctcaaaatgacagttgggctttaagtggatactcatgtagataccaccttgtggactggcaaagaagtgacgttcaaatcgtcctttggctgccttttgacttgatgccagatatagtgcaggcgtcggattaatcttttccatgccatgtttagcatctagttgggtagagttagaatctggattaaagtagactggaatgttgagttgcttagagatgtcttgaggaagaagaatatctcccttttctaaatagtagcctttcttgcggacacttgtaatgtcaattccttgttcttgaagtgtttgaattgccttccaaatggctgtccgtgagacaccaaggcttttagccaagctctctcccgtcacaaaatcaggactcttcgataagatgtcataaacgtgttcataagttttcatatcctaagtataatacaaaagatggtaaaatgctcactataacttattgataaggcttgataataaataactatatgactagactgaaaaaacatgatataatagacggtagttattaagtcccgataaggcaacagtcatcctagagttggctgttggttctttgtaactttttaacggcgtttagctctaccaggagcatagcgttttacctattaggagacggttaaatccgtgctatctaatactatttttcatattaaaagggggacattttatatgtcagaacgtaaacttttcacgtctgaatcagtatctgaggggcatccagataaaattgcagaccaaatttcagatgccattcttgatgcgattttagcagaggatccagatgcacacgttgcagcagaaacagctgtctacactggttctgtccatgttttcggtgaagtttctacaacagcttatgtggacattaaccgtgtggttcgtgatactatcgctgaaattggttataacaatgcagaatacggctttgcggcagaatctgtaggggttcacccatcattgattgaacaatcaccagatattgctcaaggtgtcaatgaagcacttgaagttcgtggaactggtgatcaagacccacttgatcttatcggagctggtgaccaaggtttgatgtttggttttgctattgacgaaactccagagtttatgccacttccagttagcctttcacataaattggttaaaaaattggcagatttgcgtaaatctggtgagatttcataccttcgtccagatgctaaatctcaggttaccgttgagtatgatgagaatgaccaaccagtacgtgttgatacagtcgttatctcaacgcaacacgatcctgaagcgactaacgaccaaattcgtcaagatgtcattgaaaaagtcattaaggcagttattccagccgaatacttggatgatgagactaagttctttatcaacccaacaggtcgttttgttatcggaggacctcaaggggactctggtttgactggtcgtaagatcattgttgatacttatggtggctactcaagacacggtggtggtgccttctcaggtaaggatgccactaaggttgaccgttcagcttcatatgcagctcgctacattgccaaaaacatcgtagctgctggtcttgctaagaaagcagaagtacaattggcttatgctatcggtgttgctaaccctgtgtctgtccgtgttgatactttcggaacggcgacagttgctgaaagtaaacttgaagctgctgtccgcgatctctttgacttgcgtccggcaggtatcattcaaatgctggatcttaaacgtcctatctatcgtcaaacagcggcctatggtcacatgggacgtacggacatcgatcttccatgggaaaaattggacaaggtagatgccctcaaagcggctgtagaagcttaaaaagatttaatattactttcaatttaataatatcaaagtaacagaatttaatttttttgaattctgtttttttgttttgaaaataaataatatgaattttctgactttaaacacttgtaaagcctatggattgagtgatttaaggataaaaactactagctatagataaattcttttggtgaaaacctttgaaaggagttgaaaaataagaataaattgctataataaaagtgacgatgtaaatataaaactagagtcattttagattgatagagtaagaagaaatacctttaaataaggtttaacaggtgttagataatctaaagtgatctggttagtttgtgatttcttggggaagctaatcaacataacaagatatttagttagtcaatttaatctattctttaataatattaatttacgttaatgtttatttagaatgatcttgttctttcttatatttttaaaatctttaagaatcttcgaaagagattcagatgagagttacgtgctcactcattggggaggaggccataactttcaaagagctttcttaagaaaggcattacatggtggtcttgagattattgggaaatacttgagactaatgattagaatgggtagagagtgtagttaaggggacactcttaaaagtggggagaagtttatgaatattttgatacttggtaatactgctggattaacaaacgatttcattttgaaaacgtttcctaatcaagcagtttttatttttggtcatacaggtgtaaagaactctcgtaagaataaaatcaccgtatataccaaacattatgagaacaatcaattagaagatgtttttgattttcatgattatgatcaaatcatctatttttcggaatatctcaattatggacatgaaagttcaggggagattgaaaatctcatcagattgttagagtgtcttaaagatagaaaaaacaaacgtttactttacattacaggtcctgtccttgaggatgggaaacgaagcttacagacgacaactaaggataccttattatcttggactcgagaatttggggtcaaccttaaagttctgcatagtccctttctttattcagtcattaataaagaagattatctatataaactgtttgtacgtttagacgatcatgagcaggtggagttgaaggagtcatcacaaagtcaggcgacttttatcagtctatctgacttgggagatttgcttcacaaattatgtgagcgatggaatgacatctatgaaagtattattattccggatcccttccaactgacttttggtgagctcttgcaagctttggataaatatttccctaacaagcaggttcatttcttagaggaaagaagaattaggaaatatgataacgatcctgaaaagcaccatgatttgcgtgatcgattcgcttggtttatgcgttatgccttggtgcgtgacttgccagatatttacgaagactatcaaaagcagcgaaaaggttctttacgtgtttctaagttccgcaatatcgtagataatatcgttaagcaaaagagaaataagaaacttgctgctgttgtcgcgactttcttagtttttgaagcttttcgatatatgactcaaggtcagttacagttccaattgaccgacctacgtttgctctttgttgtcttgattagtacagttttgggcatggggtatggcttgttctcagcagtacttgcaattattggtttgacaatcagtcaaattttgtctgggactagttggcaattgcttctatataatacggaccgttgggtggcctttattgcctatatctttatcgctgttgtttgtggttctgtggaaatgaagaaaaaagatgacaagctacaactagacaaacagttggaaacagttaaggaagactatcttatccttaatcaatcctaccatacattacttaatgaaaataaagacctgaaaaatgccttgttagcaagtcaagatggtcttggaaaagccttttcttactttgtgactttagatcatgctagtgttgagaaggttctcagacagacgattgatttggtttcagagattttgaatgctcctgtttcactttatggtggtggtcctttccaatatgaacttcttttgggagataacgataagaagcaagtatctttgacagattttaaagaagttggagatgccttcggtcatggacgtgtctgggctaataaatcattgcttgagaatcgtccagcttatgccatggaaattaggaccaaggtagatggtacctttatcatttgggtagaggctgttccttttgaagctatgtctactaaagtgttaaacgagcttgaggttctttcaaaaatgagtcgttctttcattgaaaaggcagaacttcttgaacaagctagtcatcaagggagggttgcacaatgattccagtcctaattactagtattttaacggtttgttacttcctatctatagcacttgtctataaagccattgttagtggcagatcagatttaaccattttttacttgattttcccaattgctttacctttctttggtgccggtctgattcatatgatttctaagccaaatcctggtagacaccgtcgtggtcaagaagcagcagttggtggcaaaattaaagatttgaccattgattttggaaatatcgatgattttcaacgtcctaaggaattggttgaagaagacatcgttcctcttgaagaatctctctatttgaataaggctaaggaagctcgtcagcaattgatgggattggctaataatgatccatctcattttatggatttgctctacttggcccgcttaaatgaggacagtgaaattgttcactacgcgacaacctttatttctgaaatttcaagtcaatacgatgagaagttgagtgcctttgagaaacgttttgaaaagggtgaagaagaccttgacctcttaaccgagtattgtgactttatggaagactacctatctaaggaacttctaagcaaacaaatggaaggtttgcttcgtaaggagtacgaggagcgtctcttgcagaaacttagtcatggaacgactgctacggacttagtgagagttatccataatgaactagctcttggtttttatgacttggcccaaaagcatttgacacagctttcaattaaatcacatgcggatgatgtgtattatttgtatttggaatattactatcaaaccggtcagtttgctgaatttaagaacatgattcgtgagatgcaaggcaaaaaggttgttctttctaaggataagcaagatctcttgaacttctggcaaggaaaagaggtgatggcatgaaattaggtaaaaaaaatgttattcgcaaagaaaccttgctaggtgttggtcttattttgtgtctggccattggactctttgttcaaaagaaaggggaatggtacccgactcaaggtaaggaagcctatctaacaggaaaagtaccatctacggcttcagtcgtcaaaaatttagataaagatacgctagttctttatgatagtgaaaatgaaacgagtcagagggcttggaaacagttcgagcaaattctaaaagatatgcgtatgggagctaagttagtcgatgtggctaaacacgagtcctattcgctttccgactataaaaaagtggttctacttgtaactgacctttctcgaatggaggaccaggttcagccactcatggattggactgaaaaaggcggtcaaaccctttttgcagtaactatggggaaagaaagtaatcttgatgccattgatcacaatctcggcgtgagttattccaactttgagatggatgaggtcaaggaaatctacgtggatcctgacttcatgattggtgggggacgcaattataaaattgaagaaccttttgagtcagccagaaaagtctctcttgaaggtgatgttaaggtgcatgctaaaacaacagatgattctcatacaccgttgatttgggaaaaatcatacggcaaagggaagtttgtcgttgataaccttggaatctatgagcgtaatgtccgtggtatttatgccgcttcttatagccttttgactgaagcgacagtttatccggtaatcaatggctctacctattatatagatgatttcccatcacctgttccagctggagatggtcgtttcgttaaacgtgattacgacatgtctgtgtctgaattttataccaatgtttggtggccagaccttcttaaattgcacgaaaagtatggtatcgttcatacaggtgtggtcattgaaaactatgaggcccagacagacggtaaaattgttcaacaaaatgatttagatcgtttcaaatattttggaaattcgcttttggctaatggtggtgagcttggttatcatggttataatcaccaaccattgagtccttcatctgttaattatggtgaaaagtatgcgagctacaagacttggaaggataaggctgctatgaaggctggtctgtctgagttgattcgttttgtcaaccaactctttcctaaagcgcaaaaatcagtctacgttccaccatcaaacattctttcgaaagaaggacgagaggtaatcgttaatgatttcccagaaatcaaggctatctcaagtaactatttcccaggggatttcacttattcgcaagagtttgaagtgtcgcctgatggaatgattgaagagccacgtactgtctctggtgcggtttgggatgatttctcacagatgacggtcttttctgaaatgaatatgcactatgttaataaccacttccttcaccctgatgatgttcttgatgtcgatcgtggtgcagaattgggttgggcaaagatgtataaggctttggacaaggaagttagttgggtccacaatatgtcaccttcgcttagaaatctaacaggttcagaattagcaggtgctgttcagcgttacggtattttgaaagtttctcaaaaatataccaaagacgccctaaaaattgatcttgagaattttcatgatcatgcttaccttatggttcgtttaaatcaaaacgaggttaagaaggtaaaaaatggtaaggttacgcatttaacgggtgatctttacctattggaggctacgaataagtcagtcaccatcacattaaaataaggcaaaataggggaaatgccgatgaagatatgtttaattcttgaagggtcctatccgtatgttcacggtggtgtctctacttggatgcatcaatatattacagaaatgaaagagcatgaatttgttctctgggttgtgggggcaacacatgagcaaaagggaaagtttgtttatgaacttcctgaaaatgtcgtagaagtacacgaagtctttttggactatgttgtgccagataaagaagaagacatagagccacatcagtttacagatgaggaaaaacaagcgcttaaagatatggttttttgtcaacaacctgattggaaagtcttgtttaaacttttacaggatggtaaggtcgttcctaacgatctcttgagtagtgaggccttttttcaggtcttgaaggatctctgtagtgaacgctacacgcagctatctttttcagatgtttttcacacgatccgttctatgctgtttccacttttaaatattttatcttgtccacctcctgaagcagatgtttaccactcaatctctacaggttatggtggtattcttgcaactttgggcagtttgacctatgacaaacctctgttcttaactgaacacgggatttatacgcgtgaacgtgaggaagaattgcttcgtgccaagtgggttttacctacaatgcgccaacagtgggtaaggttcttctatatgttgtctgatgcgatttatcaaaatgctgaaaaaattaccagcctctttactaaggccaaggaaattcagattgagatgggttgtgatccagagaaatgtcaggttatttcaaacgggattgactacgatgcgttttctcaaattcctttgaaagaaccggatggttggattgatatcggagccgtggttcgtttggctccaattaaggacatcaaaaccatgttgtattctttctacgaactagctcagcaagtaccaaacgttcgtttgcatatcatgggtggcatagatgaccaagaatatgcggatgagtgttttagcttggccgataagatggacttgggagatcgtctcctattcactggtcgtgttaatattcgagaatatatgaagaaaattgattttacgcttttgaccagtctttctgaaggtttgccactttctgttttggaatcaatggcggctagccgtccttgcgtgacgacagatgtcggatgttgtcgagaattgctagaaggtcgtgaggatgacaatctagggattgcaggattttgtgcgccacctacttgtacagggcctcttgcagaagctatgaagaagatggcgattaatgatgctagacgtcttgaaatgggtgaaattgcgcgtaagcgtgttgaggcgatatatcaatatccgcaaatgatcggtcagtatcgacgcttatatgaggaggtggctgtttaatggccggtattggatttgaattacgtaaaatttacaacgaggatagccttttttcaaaacaaaaggcctacgcatatgctggaattgtttataccggtcctatgcttttagggattttacttacagctggtgtcgttgttctgacaatggtcgcgggaatcagtgaaaatgagcgtgattatattctttcaaacttaacttacgctattatcttttcactcgtgattaccagtctcttttctctggtggtaactcgctttgttgcggacatgctctacgagaaaaaatttgagactatcatcccttcattttatgcgtcgagtgccttgatgcttttgattgggacaccactttatgcgatctatctagccttggctagtcgaagcttagcagaagtggctatgggagttttgctctttggtgagctttgtctcgtttggaatgtcattacctacttgacggcgattaaatcctataaagaaattatcaaaggtttctttttagcgattggtgtgacgattgtctctgggttacttagtattttactacatcaaaagtatggtatcttcctaagtgtttgtttgggatacggtggaatgatgttttggatggttcgtcttatccatgactatttcccatctaatcttaaaatgtcctttgagtttttgaaatggtttgatcaattctctgatcttgccaagactggactttacatgttggtggccctctttgctcatattattattaactggtttgggccaattagtaagagttttgacggcttcttccgtacagctccagtctacgatgtgccagccatgctagcctacttaacgactttggtatcaacacttaatttcgttatgtctgtcgaggtttccttctatccgcatttccgacgttattttaacctatacaatgaagagggaagtctttcggatatccaggaagctgaaactcaaatgctggatgtcatgagtaacgaactcaaatatgttttttggaaacaattgctagcgacaattttcattatgttcttcggaagcgtggccttgacttatttaccaattggttttaacaatcaaatgcatgggtactttttaacgctatgtctggcttatggtctctatgctgttggtaatgtaaatatcttgctattgatgtattttgcagattataagggggccaagaaacttgccaaacactttgctattttgacagtagttttgagttttggttctcagttcttggactcagccttcctcggttacgccttcttgatttcttctttacttcttttccttgaaagtggtcaggaaatcgataaatacacaagtgatcttcagtatcatttcttaggaagccaagccatggtatctaagaatgacgtgggctattttgaaaaatggactgagcgtttagaaaacatacaaaagaggtgggggaaatgaataggaaaaagagtttagcagcagttttgttgctctgtacggtctttggttttacagcatgcggttccaaggagcagacaaaaaacggtgtgacaactaaaaaagtagataaacaagcggccactgatatctctaatgtacacttaagagacaaaaagagtctctatgataaggatcatacgaaggtaacgaccatgtacctgactgtacgtcgtggagatgctacagaaaatcaaaatcactcatggtctgaggtcaaccaatattccgttgaagattatcagaaaatgcatgttaaacgatatcaagtagcagggctcctccaagtaggtaacgaggatggtcctgtctctggtgagttaggttatgaccaagacgtgccaaatgccagtgttcagattcgtggggaaagttcaagtaagaacgcccaaaagaactacaaaatcaagattaaaaagaacaagggtgagtggaacggccaacgtacgattaaccttaacaaacaccagactgaagcccttcgctttagaaataagatgtcctatgatttaatggaagaaattccacaactcatgggtgctagaacgagttttgttcacctctacgttaaagatgaaacctctgacaatccttcaggtaaatttgaagattatggtctctacacgcaagtcgaacagattaacaaaaactatctgaaagatcatggtctagatgaaaatgccaacctttataaaccaaacttcttcgaattcttccgctatgaagatacgattgttaaagaagatgatcctaaattcgataaggataaattcgagaaacttttggaaatcaaaggtagccatgatcacaccaaacttattgattttctaaccaagctcaacgatccatcggtgaagatcgaaaccatcatggacaagtatgtagatcctgagaatatccaatattggatggccttccagatgttgcttggtaatgatgatacacagagtcgtaacatgtatctctatagcccacaaaactcaaccaaatggtacatcattccttgggataacgatagtatcttgatgaagaatgaacgtcgtttggtaagtaaggacagcgaccaagccaatagctgggaagtcggtgtcagcaactattggggtaaccaacttttccaacgtttgctcaaatcaaaagagttccgcaagggtctagatgagaagatggatgagctacgtaagacaattactggtgacaagattacttctatgagtaatgaatacgcagcagtcattaaaccttacctagctaagatgcctgaccaaatgcatgctaagacaacacctgataattacgacaagattttggcagatttgccaaatgagttggagaacaactacaagatttacaaaacaagtcttgaaaaaccacaaccattctttatcaataagccggaagtggccaataacaaattgaaattaagttggggtgcctcttacgacttcaataacagcaagttgacttacacagttgagttagctaaggactatgaatttaaagacaaggtctttgaaaaatctggtctcaagaccctcagtgctgaaacagataccttgcctaagggacaatacttcgtacgtgtgactgcaactaatgaggctggacaatcacaacgtgcctttgactactatgtcaatagtgataactctaaacaatttggtatcatgagcttctttgtcctcgaagatggaaaaattggggtagatggttatgaagactaaagagaagccctttcgccatgagttgaaatacgtcattggtgaaccagaaaaggccctgttgactgagcgtttcaaacatttgattcagttggataagcatgcgacaaatggtggttataccattcgaagtctttactttgacgactattggaatagtgcctatgctgaaaaagatgcaggtattctggttcgtaaaaaatatcggattcgtatctacaatttcgggaccaatagtatcaagctagagcgtaagaaaaaggttgatacctacattctgaaagaggatgcaccactaactgtcgaagaattttataaaatcattgatggggattatgactttctcttgaaaagtccctatcctctctgtcaggaattttactatgaatgtgttagtaacatgatgcgtccacggaccatcgttgattatgaacgagagccgtgggtttatgactttggaacagttcgcttaacctttgaccaaaatgtcagagtagcggttggaagttttgatatttttgatccggacttaccaacaattccagtcattgatccggaaaagatggttttcgaagttaaatatacagagtatctgccaaagattgtccaaagtgtcttgccagggaaagcagacatgatggctgtctctaagtacgtattggcttatgaaaaatctcagtatctaaatggttttgaatactgggaagatgggaaaatataaatcggaaaagtgctaagtttggaagaacttagtataaaaaggggaatttatgagtgttcaagactttataaaaaaatctattttgcagtctgataactatgcgacgcagtcaccgtttcgtattgttatcgtcttgctacttgccttgttgattggagcctttatctataaggtttaccagcatttctttacaggcgttatttattcacgcagttttgccatgactttggtcggtatgaccttgcttacgtcaatggtaacactggcaatcagttcaaacatcgttatctcacttggtatggtcggtgccctctctatcgtccgttaccgtactgcagttaaggatcctatggacttgctctatcttttctgggcaattacctcagggattacggtaggggcaggtatgtatgtcctagccgttgtaacgtctatcgttatcctactgatgcttattgtctttagccgcttgcaagagactggtaaggtgtatatcgctgtggttcactttgatggtgagcacacaggtgacaaagttattcaagaacttggtcgcatcaagcactttatcaagtctgaaactatgcgaaaagacagtgttgagatggctattgaagtctttgtgaaaaataacgaccttaccttcgttgaaaacattaaatctatcgaaggtgtcaaagaccttacgctgatccaatacaacggcgaataccatggctagaagacgtgagaagaaaagttggagtagtcgaaagaagaaactttggctcgtcatctgtctaatcatcattacgagtggtctttatgccatttttgtgtatttaaataccagaaacacaggtaccaagtttgaatatacgctttcagacaagagttttgggaatccgctcatgggttatgtcccttcagctgaagaaaaaacagtttctgaagacattcacctagtctatgttgatattacatggaaagaattggaacctaaaaagggccactataactgggaaacaattgaagaaagtaaccagtttaaacgatggaagaaagaaggcaagcaggtcgtcttacgtttcttgctagattaccctggcaaatcaagtcataaggatatccctaactggttgggaaatgaaatttctgaccttggggatgcttatagcacatcctacggtaagggattttcaccaaattaccaaaataaacggcttagaaaatactataaagatgctgttactgctatgggacagcgttggggcaatgatgattttatcgcctacatcgagcttggtggcctaggccactggggtgagtggcatgttcactcagatgcgggcattcgccaattgccacgaaaagaagttcgtaaggactacattgctccgtttcaaccagcctttcctaaagcaaagattcttatgagaagaccttttgatacaggtttggaaggtgattttggaatctacaatgatgtctttggagacaaatcagcaactaaaacctggttaaattggattcaaaatggtggatcatatgatcaaacccaagagcaagctgccttgaaagccatgcctaaggcctgggagaaagcaccaatcggtggtgaattaacaagttcgcagtctatgtctactttgcttggtaataacttagacgagcttacagatgaagccaaagcagctcatttgaccttcttgggtccaaaggttgctgaagatattggtgacgggcaagctgcttataaggaactcttgaagaacatgggctaccgtctctgggtatcaggtttgacaatttccaaaggagagagcaaggttgaaattacccttaatttggaaaattctggggttgcccctttatatggggattggcctgtggtattatacttgtgtaatgctaatggtaaggttcttcaagcccaacaacttgattgtcgtttgtcagaattgcttccagatcaaacaactgaacttaaggcaagtttcgcctattccaaagatcagaattatcaggtgaagctaggaattctatctccaatgacacaagagccttcggttcattttgccatgaaaggttttgaaggagaagtcatgcctaaattagcaacgattcaaaaggatcaaaaaggcactgacaagtaagaaaggaaaaatatatgtctattttaattacaggaggagctggctatatcggtagccacacaaccgttgaactccttaatgcaggtttcgatgtagtcttagttgacgacttttcaaatagttcgccagcagttcttgaacgtttggaaaagattactggtaaaaaatttccattttatcaaggttccattttagatactgattttttggataaggtttttacaaatgaagatattgagttagttattcacttcgcggccttcaaggcagtgggagaatctgttcaaaaacctttgaaatattataaaaacaatatcagtggtaccattactcttcttgaaaaaatgaaagaatatgatgttaaaaacatcgtcttcagttcaagtgcaacagtttacggtactaataatccttctccaatgacggaagatatgccaacgtcagctattaacccatacggttatactaagttgatgatggaacaaattcttacagacgtagctgcttcagatccgtcatggtcagtcacaaatcttcgttatttcaatcctatcggtgctcatgaaagtggtttgattggggaattgccaaacggtattccaaacaacttgatgccatatattacacaggtagctattggtaaacttcctgagcttaacgtctttggggatgactatccaactccagatggtacaggtgtgcgtgactacattcacgtccttgacttggcctcaggtcacttggctgctgtcaaatataatttgagtcataaaggtgctgagattttcaacttgggtactggacatggttatagcgtattggatctcgttaagactttcgaagctgaaaacaaggttgctattccataccgtattcaaggacgtcgtgctggtgatattgctacttgctatgcctctcctgaaaaggccaaagaagttcttggctgggaagctaagaagaccttgaaagaaatggttagagattcttggcgttggcaaacgactaaccctaacggttatgaagactaagttgcataactcaaattataagtccctagagagtgtaagctaagcactagattattttaaagtatccctaatctagtagcttcaaaaataaagagaagaggagtggaagcagtcactaaatgattacagatttagaactgtctcaccctctttttatgttttagcttagctttctatggtataatggagtcatgactattattaatcaattcgtcactttggcgagtcaccttgtatttataggattgagctaccatatgctgattagcctctttgattgggcaaaaatcatcaaaaatccgattgaaaatactggtaaattgaaactctttttgctctttattagtattgccttaggctatcttatcagttcctttattctgtcggttttagcttttggacagaatatggctagctcgatttcttaaattagtgattttaaaagacttttgatataatacaaaaagatgaaaatgacccttgaaaggaatccttatggataaaattattgtgcagggtggcaacactcgattaagtggtgaggttgtcattgaaggtgcgaaaaatgctgtcctccccttgttggcagcgactatcttggcctcggaaggtcaaacaaccttaactaatgttccaatcttgtcagatgtttatacgatgaataatgttgttcgtggtttagatattgctgtagactttgacgaggaaaacaatactgttgtcgttgatgctagtggagaaattctcgatcaggcgccctatgagtatgtgagcaagatgcgtgcgtctatcgtagtacttggaccaattcttgcccgcaatggccacgcgaaggtttcaatgcctggtggttgtacgattggtagccgtccgattgacctccacctcaaaggtttagaagcaatgggtgctaaaattacccaagttggtggtgacatcactgcgacagcagaaaaactaaaaggtgcaactatttatatggactttccatctgtcggtgccactcaaaaccttatgatggcagcgactttggctgatggagttacaaccattgaaaatgctgcgcgtgaaccagaaatcgttgacttggcccttcttcttaacgagatgggagcagatgtcaaaggtgctggaactgaaacactcgtgattaaaggtgttaaagctctccatggtactaaacatgcggttgttcaggaccgtattgaagcaggtacctttatggtagcagcagctatgacttctggtgatgtcctcatcaaagatgctatttgggaacataaccgtcctttgatttcaaaattattggaaatgggtgtttatgttaaggaagaagacggcggtattcgtgttaaatctgatgtttcacaattgaaaccagtaaccgttaaaactctacctcacccaggtttcccaactgacatgcaagctcaatttacagcacttatggcagtggtaagcggggaatcaaccatgattgagacagtctttgagaatcgcttccaacacttagaagaaatgcgtcgtatgggacttcattcagaaatccttcgtgatacggctatgattcacggtggtttgccacttcaaggtgctcaagttatgtctactgaccttcgagcttcggcagcactaattcttacagggatggtggctgaaggaacaactactgttggtaaattgacacacttggatcgtggttactatcaattccatgagaaactagctaaactaggagcaaatatttcacgtgtaagtgaggcttagtatggaaactggtaaaggctatgtttttcgtcaattattacttgttttgagtgtgtgtgtgattggccttgcttttctagcaatcggattgatgattggctatgctgttttaggagagggcaaggatcctataagcatcttaaaaccagaaacctggcaggcaattgttgctaaatttacaggaaaataaaagggagtgggaagtaatcccgctcctttagtcatgacattcatataaaagaaagagaacaatggcaaaaagaaagacatctttaacaaataaacagaaacgtcagctagtctcgttactaatagcggtcttgattgcagttttaggttacattgggacgagcaataagctatcgcctaataatccaatcaagcaggtagctagtctagtctcgggaaaatccaataactccgttaaatcaaacggttcaacaaatggaaaggctacgccacaagagcagcttgctgagtcagtgatgactacctccgtcaagagtcaactaggaaactccttagaatggaatggggcaggggcttatattgttaatggtaataagactaatctaaatgctaaggtttctagccaaccctatgccaataaccaagtcaaaacggttcaaggacaaacggttcctacagttgcgaatgccttattaagtaaggcaaccagacagtacaaaaatcgtcaagaaacagggaatggctcaacctcttggacacctgcgggatggcatcaagttcacaatctttcaggagagtatagccatgccgtagatagaggtcatttgttgggctatgcacttgtaggtggtctcaaaggatttgatgcctcgacttcaaatccagaaaatattgccgttcaaactgcttgggctaaccaagctaatagcgaaagttctacgggacaaaactattatgaaagcctggtacgaaaagctcaggataaaaacaaacgtgtccgttatcgcgttacccttatttatgaaggggataatctcattccatcaggctcacatcttgaagccaagtcagctgatggctcacttgagttcaatgtctttgttccaaatgtacaagaaggaattaccctagattattattcaggaaaagtaacggtgaattaaagcaacgaacgactctgattggagtcgtttttagtatccagaaaacaaaaacccaccctcaggtgagtttttgttttattcactagcttgctcccattgtttagagaggtagcgagagtagctagagatggcaaagttgaccacgaaataggctaaagccacgataccgtataaggtaaagatttggcttggttcgtagtaaccacccatcaaaatttgactcttaccaaataattcctgtaaggcaataacagagtaaaggaaagaagtatccttgataaccgttacgaattgagaaatgatagatggtaacatcttacgaatagcttgtgggaagatgatgtaaataaagatttgtctgttgttaaacccttgagacaagccggcttccgtttggccatggtcgatagagttcagtcccccacgaatgatttccgccaaggccgctgaagtgaagaccgtgaaagaggtaattcctgccgctgtagacttaagctggaagaccaagaagataatgaaaatccaaagcaagttaggaacgttacgaacgaactcaacgtagatagaagccatccaacgaagaataggattctttccgttacgcataaccgccagaatagttccgaacaaggtagacagcacaatgatgaagaaagacaagtaaagggttgtccacatcccttgtgccaagaatttaaggttagtagctgataaaacttctgacatagtggacctccttagtaagctttcttattctcttcttctttacgacgtgcccaagtagctagagggaaacacatgataaagtagaggaaggcagccccagcgaaggccggcacatagttagtggtatcataagcccaagacttagcagtgaacatgatatcagccccagaaataatggcaactgtagaagtgttcttaatcaagttaaccacttggttggtcaacggtggcaagatagtacggactgcttgaggcaagatgatgatacgcatggtatcagcgtaggtgaatccttgagacaaagccgcttcggtttgacccttaggaaccgcctcgatacctgtacggataatttcagagatataggctccagtgtagatacccacacagaggatagctgtcaatgaaattggaatcatgacatgaccatcagtcaagatggaaattccatagaagacaaccacgaattggacgagcaagggtgtgttctggaaaatttcaacatacacacgtgagatgccacggaggaccttgttatgagtcgaactcatagctccaaagatgagcccaagaagaagggcaacaatcaaggcaccgattgaaatgccaagggtatagaagaaacctttggcgaattgtccaaagttagcgaagaaagcagcccaacgttcaagagcgaaaggactagccgtttcagttaaaagatacataaattcaggactcctttctatttatcttcagccttagctggtttcaagtgatacttatcgtagagcttttgaagactaccatctttttgccatttagccagcaagtcgttggtatagtcaatcaactcttggttagacttgcttgaagcgataccgtattcttgcgttttgaaaccttcttttaaggttttagttttcttactttcatatccagagaggatagatttatcaactgagaaagcatctacacggtgagcgtaaagagaaacagccaattctgggaaagatccgagttgaacatagttgaacttaaggttattagctgaagcgtactcttgcaaggcagccttagttgaggcaccttgagaaacaccgatagtcttaccattcaaatctgagattttgttaatacctgaatccttaagaaccaagaaaccgatttggtcatagtagtaaggagttgagatagcgtaagaagccttacgttcatcattaatggtataggtagcgataagcaagtcgatagtaccgttatccataagtggttcacgagtttgcgtcgttactgggatataattcactttaacttttaactcatcagcaatcttcttagcaagatcaacttccataccttcgtaggtattagtcttagcagaatagtaaccaaagttaggaacgtcttgcttcactccaacattaagtgtccctcgcttaacaatcttttggactgccttactatttaggagtttgctagaatcttctgcctcagttttgtgactagagaatagaaaaacagctgtgatagccaaggtgacgactgttagatagcgtaagatttttttgaaagtcataggcaacctccttaagcatcgacgtgaacacgatcagagttatggtcgataatcttagaaaggaattgtactgcacgcggttcagtaggattgtcaaagaaaccatccacatctgttgtgtcaacaagaatctgaccttcagccatgaaaatgatacggtcagccacactacgggcaaagcccatttcgtgggtaacgaccaccatgttcataccacctttggcaagcttttgcataacagcaagcacgtcaccaatagtctctgggtcaagggctgacgttggttcgtcaaagagcaagagctcaggattcatggcaagaccacgggcaattgcgatacgttgtttttgcccaccagaaagcataccagggtatgaatctttcttgtcccacatgttaacgtagcgaaggaatttttcagcagtcttttcagcctctgctttactgattccaagaaccttgataggtgccaaggttacattttcaagaacggttttatgcgggtagaggttaaagtgctggaataccatccccgcttccttacgcaattctaccaaatctttggcagaagcttccgtcacattatgtccattaacgataagcgtaccgttatcaatggattccaaggcgttgattgtacggatgagggtggatttcccagacccagaaggtcccaagagaaccacaacttgtcctttttcaatttctagattgatatcacgaagtgcatgataatctccgtaatatttattaacatttttaaattcaataagtgccataagagcctcctataatggatttacttgttagcttttctaacatatattgaattttagcataagtaaagtcgaaagtcaaaaaattccgaatattctttcaaaacgttcggtttttactaaataattaatcattttttgatataaatatgagaaaaacaaaaacccaccggcaggtgagttttttgttttattcactagcttgctcccattgtttagagaggtagcgagagtagctagagatggcaaagttaaccacgaaataagctaaagccacaataccgtataaggtaaagatttgactaggttcgtagtaaccacccatcaaaatttgactcttaccaaacaattcttgtaaggcgataacagagtaaaggaaagaagtatccttgataactgttacgaattgagaaatgatagatggcaacatcttacgaatagcttgtgggaagatgatgtaaataaagatttgtttgttgttaaatccttgagacaagccggcttccgtttggccatggtcaatagagttcagtcccccacgaatgatttccgccaaggcagctgaagtaaagaccgtgaaagatgtaatccctgccgcagttgacttgagttggaagaccaagaagataatgaaaatccaaagcaagttaggaacgttacggacgaactcaacgtagatagaagcaatccaacgaaggataggattctttccgttacgcattaccgccagaatagttccgaacagggtagatagcacgatgatgaagaaagacaagtaaagagtcgtccacatcccttgtgccaagaatttaaggttagtagctgataaaacttctgacatagtggacctccttagtaagctttcttattctcttcttctttacgacgtgcccaagtagctagagggaaacacatgataaagtagaggaaggcagccccagcgaaggccggcacatagttagtggtatcataagcccaagacttagcagtgaacatgatatcagccccagaaataatggcaactgtagaagtgttcttaatcaagttaaccacttggttggtcaacggtggcaagatagtacggactgcttgaggcaagatgatgatacgcatggtatcagcgtaggtgaatccttgagacaaagccgcttcggtttgacccttaggaaccgcctcgatacctgtacggataatttcagagatataggctccagtgtagatacccacacagaggatagctgtcaatgaaattggaatcatgacatgaccatcagtcaagatggaaattccatagaagacaaccacgaattggacgagcaagggtgtgttctggaaaatttcaacatacacacgtgagatgccacggaggaccttgttatgagtcgaactcatagctccaaagatgagcccaagaagaagggcaacaatcaaggcaccgattgaaatgccaagggtatagaagaaacctttggcgaattgtccaaagttagcgaagaaagcagcccaacgttcaagagcgaaaggactagccgtttcagttaaaagatacataaattcaggactcctttctatttatcttcagccttagctggtttcaagtgatacttatcgtagagcttttgaagactaccatctttttgccatttagccagcaagtcgttggtatagtcaatcaactcttggttagacttgcttgaagcgataccgtattcttgcgttttgaaaccttcttttaaggttttagttttcttactttcatatccagagaggatagatttatcaactgagaaagcatctacacggtgagcgtaaagagaaacagccaattctgggaaagatccgagttgaacatagttgaacttaaggttattagctgaagcgtactcttgcaaggcagccttagttgaggcaccttgagaaacaccgatagtcttaccattcaaatctgagattttgttaatacctgaatccttaagaaccaagaaaccgatttggtcatagtagtaaggagttgagatagcgtaagaagccttacgttcatcattaatggtataggtagcgataagcaagtcgatagtaccgttatccataagtggttcacgagtttgcgtcgttactgggatataattcactttaacttttaactcatcagcaatcttcttagcaagatcaacttccataccttcgtaggtattagtcttagcagaatagtaaccaaagttaggaacgtcttgcttcactccaacattaagtgtccctcgcttaacaatcttttggactgccttactatttaggagtttgctagaatcttctgcctcagttttgtgactagagaatagaaaaacagctgtgatagccaaggtgacgactgttagatagcgtaagatttttttgaaagtcataggcaacctccttaagcatcgacgtgaacacgatcagagttatggtcgataatcttagaaaggaattgtactgcacgcggttcagtaggattgtcaaagaaaccatccacatctgttgtgtcaacaagaatctgaccttcagccatgaaaatgatacggtcagccacactacgggcaaagcccatttcgtgggtaacgaccaccatgttcataccacctttggcaagcttttgcataacagcaagcacgtcaccaatagtctctgggtcaagggctgacgttggttcgtcaaagagcaagagttcaggattcatggcaagaccacgggcaattgcgatacgttgtttttgtccaccagaaagcataccagggtatgaatctttcttgtcccacatgttaacgtagcgaaggaatttttcggcagttttttcggcgtctgccttactgattccaagaaccttgataggtgccaaggttacattttcaagaacggttttatgcgggtagaggttaaagtgctggaataccatccccgcttccttacgcaattctaccaaatctttggcagaagcttccgtcacattatgtccattaacgataagcgtaccgttatcaatggattccaaggcgttgattgtacggatgagggtagatttccctgacccagaaggtcccaagagaaccacaacttgtcctttttcaatttctagattgatgtcacgaagtgcatgatagtctccgtaatatttattaacatttttaaattcaataagtgccataagagcctcctaaaattttacattaatatatgtaacaacaagagtgtattttactatagatataggaagatataggaaaatgtcaaaaatgtttgaaaattcaatcataatgttcgtcttttaaccgattacacatagcaaagctatcttaaaaaacaaggaaagcttgcatatcagctcaatatctatagtggaaacttggtccttaacctattttttggtataatatgtttgatacgtaaagttttctactttacaaaattgaatgacttaagaaaaccgatgaggtgtttatatgaaaaaaattctagtagttgatgatgaaagaccaatctcggatatcatcaagtttaatctgactaaagagggttatgaagtggttacggcttttgatggtcgtgaagctttggagcagtttgaagctgaaaagccagacttggtcatcctagacttgatgttgcctgaactagatggcttagaagttgctaaggaaattcgaaagacaagtcacacaccaattatcatgctttccgctaaggatagcgagttcgataaggttatcgggctagaaattggggcggacgactatgtgacaaaaccattttctaatcgtgaattgttggcacgtatcaaagctcacttgcgtcgtacagagactattgaaacagcagcagaagaaagctctaactctggtaagcaggagatttcaattggtgagttgattattgttccagatgcgtttgttgctaaaaaacgtggaaatgaagttgagctcacacaccgtgaatttgagttgcttttccatttggcaactcatatgggacaagtgatgacgcgtgagcatttgcttgaaactgtttggggctatgactattttggtgatgttcgtacggttgacgtaaccattcgtcgtctccgtgaaaaaattgaagatacacctagtcgtcctgaatatattttgacgcgtcgtggtgttggttattatatgaagaattatgactagtattggcttaaacatcacaagctttgaactagccttactctttacgctcctctttgtggctttctactttatttttctggcttatcgtgattatcgacaagtcaaaaatattcgaaagttgaccaagagggtcaagtccttaatggcaggtaactataacgaggagttacgcttaaagggtgatccagagcttttagagctagctgacagcttgaatgatttatcggacgtctttcgtttgacgcatgaaaatctggcccaggaaaaaaaccgcttatcatcagtcctctcttacatgagtgatggggttattgcgactgatcgacgtggtcaaattaccatgattaatagcacagctcagcgtttgttgaatctagattttgagacagcgacacagatgtccattttagatttattagatggtgaaaatccctatacttatagtgaattgctctctaagactcctgaaattcatttgtcacgtcgagatgccaacgatgagtttgtgaccttacgtgttaactttgcccttattcgtaaagaatcaggttttatctcaggtctggttgctgttcttcacgatgccactgagcaggaaaaagaagagcgtgaacgtcgacttttcgtctcgaacgttagtcatgagttgcgtacacctttgacttctgtaaaatcctatctggaggcacttgatgatggagctctcgatgaagagattgcacctaacttcatcaaagtttctttggatgagaccaatcgtatgatgcgaatgatttctgacctcttggcactgtctcgtattgacaataagagtacccaacttgacgttgagatgaccaatttcacggccttcatgacctatatcttgaatcgttttgatcagattaaaagtcaagaaaccaatacaggtaaaacttacgaaatcattcgagattacccagtaaactcaatttgggtagagattgatacagataagatgacccaggtcgtggataatattcttaataatgccattaagtattcgcctgatggtggtaagattacagtgtctatgaagacaactgattcacagttgattgtttctatttctgaccaaggtttgggtattcctaagaaagatttgcctttgattttcgaccgtttttaccgtgttgataaggccagaagtcgtgcccagggtggaacgggtctaggcttgtccattgccaaagagattattaaacaacataagggcttcatttgggctaagagtgagtatggtaagggttcaacatttacaattgtgcttccatatgacaaggatgccatgttggttgatgaatgggagatggagtagaaatgacctcagatttagggtttaaatatagtattttggcttcagggtcaactggtaattccttttacttggaaactccagagaagaagattcttgtagatgctggtttgtctggtaagaaaatcacaagtttgctagctgagattgatcgtgacccgagtgatttggatgcaatcttagtaacgcatgaacacaaggatcacatccatggtgtaggcgttttagctcgtaaatatggcatggatatctacgccaatgagaaaacctggcaaattatggatagtaaaaatatgcttggtaagattgataatagccagaaacatgttttttctcgtgataagcttctgacctttggagacattgatattgagtcttttggagttagtcacgatgctattgatccacagttctatcgctttatgaaagatggaaagagtttcgttatgttgacggatacgggttatgtttctgatcgtatggcaggtattattgagaatgccgatggctatctgattgagtccaatcatgatgttgaaatccttagagcaggttcatatccttggtcaaccaagcaacgtatcctctctgatcaaggtcacttgtgtaatgaagatggagcggatgctatgattcgtaccatcggtaataaaactaaaaagatctacttgggtcacctttccaaagaaaataatatcaaggagttggcccacatgacgatggaaaatcagttggcacgtgctgactttggtgttggaactgactttaaagtttatgatacctcaccagacacagcgactccactgacagacatttaaaaatagcagaagagctgcactaatacgtttagtgcagctttttaaaaggaatgtatttatgaaagtaatttatctctcgttagggtttgtctcgctcggtttgggaattcttgggattcccctccctatcttacccacaacaccttttctacttttagccattgcttgctttgctagaagttccaaacgttttgagaaatggttatatcatactaagctgtatcaaagttatgtagccgattttcgagaaaccaaatcaattgccaaagaacgaaagaaaaagattatcatccaaatctatgttttgatgggaatttcaatcttttttgcccctatactatgggtgaaaatcggacttttttgcctgacggtcttcatcacttattatctctttaaggttattcctgataaagactaagctatcatcaaaaaatgagacttccaagatggagtctcattttatatattattaatgtttgctacgtaatttcttacggagtttataggcaaaattggctggtccgtatagagggctaactggaaggttgaattccccaatgaattgttcaatacgtgggttaaatttggacttgaaattatacaagccaccatctagtgaattttcaattcctcccatgttttgccactcagcaccacgctcaaaagcgtgattagctgtttcataccatgtcaggatagctggctgataacgacggtagtcttcatccattcctgcatagatattctcagacgtcttgccaaattcaagaacgagtgtaccagagagtgggaccgtcttatttccagcatcaactttttcttgaagaaagtcaatttcctctttaagtctcttgtgctcttgtttattgttctcgatttttcctggtttagttttttcagtgaacttggctgcatcagcaatgttcttttcgagttgcttattgaggtctttgagacgagctggtaaatcaagagttgagagtgtgatgtaagaagattctgggtaggtagtcaacaacttttcataataatcaatgccacgaaggtggatgttcttacgggcctcagtcttcttcatcaaagatgcgaattgttcaagaagttcagtaccaccaaattggactgaaatccccttgtttcgagcagtacgaacagcctgcttggtactcttagagagttgttcctcagtgaaatcttccttatggatattagcctggaagcgaggttggatattctcagccatatcttcagtgaggcctgtccattcaataccaagagcttggatgtctttggcaattgccatagtctctttacggatttcagcttcttgtgaaatcaagtttttagtcacaaagaggctagggtcaaatttcacaaagagggcacgctttgttttggcatattttttaagcgaagccataacaaaggcgagcaactctttatcttgatagtccataataggtccacgagggatataaatcatagaaaagccaagagggagtggctgaataaggatactagcgacagcaacgagattaccgtcctggtagaaaccaaggcgatcatttccccaactatctttgatttttgcccatgaactactctgtaataaattcgtttgaggactgtctataacaaagcggtcatgctcagaagtactgagtccagttttataggtatacatattattctagaacccactttctaatagcgtaagcgacaccagattcatcatttgattttgtgatgtgtttcgcaattttcttcaattcaggattaccattttccataacaacaggagagccgacgacttcaagcatagcacggtcattttcttcatcaccgatagccatagtctcttctttagaaaaaccgagtttttcagcaagatgggttacagcaatccctttattggctgttttcttgagaatttctaggtaaaatggtgttgattttacaatggtaaagcggtcataaaattcttgtggaagtttggcaatggctgcatcgaggacttcaggttcatcaatatacatggccttaacaaattccttgtcagctacctcttcaggtgtacggtagtaaattggcatatgaacaagtgtagattcatgaactgtgtagcgaccaatgtttcgattacttgtgtagataccatctttagtaatagcgtgagaatgaacgccaagcttattagccaaaacctcaatgtcaagatagtcttcgtatgaaagtgtctcacggatcaattcattaccagtagaagtctcttggacaagcccaccattgaaggtgataacataatctccgtcttggttgaggttaagctcttcaagaagtggaagtactcctggaatagggcgaccagtcgcaataacaacctttacaccagcagctttagcatcttgaatcgcttgaaagacttccggtgtaacttgacgttggctatttaaaagcgttccatcaatatcaacagcaataagtttaatagacataataattacctgtttcgtttagttagtttcccttctattttactaaaatttaggcgctttgtcatagttcttcctgagaaaagtattattgtctctttaaagaagtagattaggtaagaattgcccaaatgctttttaattggtaaaataaggtcagacaaataaaggagagataaagtgattcgagcaaccaaccaattgacggagcaagaacggaagtcagcaaaagcattgattgctagctgccaagcccatgatcaaacctttcgagaaccttatctctccaatatgcttgattttgattccaatatgccggcctttttcctctattgtcaagagggagagttgcttggcttattaacggtttatgcggatgatgaagacattgaagtgagcatcctagtggaccctagtcatcgtcgcgagggtattgcccatgcgatgtatagaagctttgaaaaagaaatggcatcttaccctattcgctcagtgacctttcagacggagcgtgtttttctcgatcatcatcctgatttggcaagtcattgggatttggttgaagatgaagagacggaaacctggctagggagagacagaacaccatatgctctggattcctgttcagatgtcaaggtgctcttagctgaaccttcttacctagatgcaattgcccatctccaccaccaagccttttctgatgcagagcaaacactcgaagtaagtcgcagatacattacagaggcattgaaggactctgatggcctactttacatcctcatcaaagaaggtcaagtgattggagtttgtacggtcgatttatctgggaatagcaactacctttatggacttgccgtagcagaagcctatcgtggccaaggctatggaagctatctggcaaaatcagtcgtcaatcaactcattgcgcaaaatgacaagtccttccaaattgcagtggaagatagcaatgtagctgccaaacgcttgtatgaaaagattggctttgtcaaacaaacccaggtggtttacttgaagcagaaagggtaaacgcaatgttgaaactctctttgaggttagagttgctatcgtcttaagtaaaaagtagttatagaacagaaaggagtaatcaatggaaattaaaatcaaaaacaaaattaaagtaggcgatcaaacggaaattatcgaagaaatccacacttgtgaggttatggaaaaaggggattatacctatcttgttcatcataattccgagaaagaaaaagtggttattaagttgaatcaggatgagctagtgatgacacgcttttctaatcctaaatccattatgcgtttttctgctaaagtacctgccttggtccacattccgacaccgcttggtacccagcattttctgacagacactagtttatttgcccatgactctaatggacagacagttgatattcattatcaattgaaacatccagaaacagaagatgtttttgctgattatgaattagaagtttcttggttttaatttttgaaaaaatagaatcattttgcttgaataaagaataatttatgataaaatgtttagtacaaataagggagtagcaggtgactgtaatcatgagatttgattaacagttgcgattatgtcgtcattacgaaattttatatttccggcatattcttaaacagcgagacttgttttttattaaacaagtctctttttgtatgattttttatataaaaagagtcttgttagccatttttccctatatagaaggaggagattattttgtctaaagaacaaagtaaaaccttgttttacacacaaggagaggaagaagtcctaaaaaacttggacacttctgttgatggtttgtctactgcacaagccaaggaacgtttatatgcctatggctataacgagttggatgaaggtgaaaaacgcagcctcttgtcaaaattcatcgatcagtttaaagatttgatgattatcatcttgcttgtcgctgccgccctttctgttattacagaaggtatgcatggtttgacggatgcctgcattattttagccgttgttgttttgaatgcagcctttggtgtttatcaagaaggacaagcagaagcggctattgaagccctcaaaaacatgtctagtcctatggctcgtgtgcgtcgtgatgggcatgtcgttgaaattgattcacgcgaattggttcctggagacatcgttttgcttgaagcaggtgatgttgttcctgcggatatgcgcttgcttgaagctgcctcactcaagattgaagaagcagcccttacaggtgaatctgtaccagttgaaaaggatgttacagagacagttgaagcagaggcgggtatcggtgaccgtgtgaatatgggttaccaaaactctaacgttacttatggtcgtggtactggggttgtaaccaatactggtatgtatactgaggtcggtaagattgccgatatgctggctaatgcggacgaatcacaaacgccattgaaacaaagcttggagcaattgtctaagaccttgacttatcttattgtcgctattgctttggtgacattcttggttagtgtcttcattcgtggcgaacagcctcttgaaggcttgatggttgccgttgctcttgcggttgcagccattcctgaaggtttgcctgccattgtaaccattcttttgtcacttgggacaacgacccttgctaaacgcaattcgattgttcgtaaattgccagctgttgaaacccttggttcaacagaaattatcgcatctgataagactggtaccttaaccatgaaccaaatgactgttgaaaaaatctatacaaacggtcaattgcaaaacgcttctacggaacttggtgcagacaatacaacccttcgtattatgaactttgccaatgatactaaggtagacccagatggtaaactaatcggtgatccaaccgaaacagctcttgttcaatttggtttggaccacaattttgatgtgcgtgacgtcttaaaatcagagcctcgtgtggcagagttgccatttgactctgaccgtaagctcatgtctactatccacaaagaagcggatggtacatactttgtagctgttaaaggtgcgcctgaccaattgctcaaacgtgtgactcgaattgaaatcaatggtgaggtccgccctatcacagatgaagacaaacaagctatccttgcaactaataaagacttggcaaaacaagcccttcgtgtcttgatgatggcttataagacaactaacgaaattcctaccttggaatctgcagttgttgagtctgatttgattttctcaggtttggtaggtatgattgacccagaacgtccagaagcagcagaggctgtccgtgtcgctaaagaagcggggatccgtccaatcatgattacaggtgaccaccaagatacagcagaagcaatcgctaagcgtcttggtatcatcgatccaaatgatacggaagatcatgtctttactggagctgagcttaatgagctttctgatgaagaattccaaaaagtcttcaaacagtactctgtctatgcgcgtgtgtctcctgaacacaaggttcgtatcgttaaggcttggcaaaatgatggcaaggttgttgctatgacaggtgatggggttaatgatgcgccttcacttaagacagctgatatcggtatcggtatgggaatcacaggtacagaggtttctaagggagcttcagatatggttcttgccgatgataactttgcgacaattatcgttgccgtagaagagggacgtaaggtcttctcaaatattcaaaaatcaatccaatacctcttgtcagccaacatggccgaagtcttcattatcttctttgccacactgtttggttgggatgtgcttcaaccagtacaccttctctggattaacctagtcactgatacccttccagctatcgcacttggggttgagccggctgaaccaggtattatgactcacaaacctcgtggtcgccaatcaaacttctttgatggtggtgtcttcggagcgattatgtatcaaggtgtcttccaaactatccttgttcttgcggtatatggttggggccttgtcttcccagagcatcatacgcaatcagaaattcacgcagatgcccttacaatggcctttgcaacacttggactaatccagttgctccatgcctttaacgttaaatctgtttatcaatcagtctttaaagttggtctctttagaaataaaactttcaactgggcaattccagtggccttcgttcttttgatggcaactatcgtagttcctggatttaataaccttttccatgtgtcacacctgagtctgacacaatggcttgcggttattgtaggttccttcttgattgtggtattggttgaattagtcaaagctattcaacgtgcccttggtaaggataaaaacgctatttaagacataaagtcagagataatggtctctggctttttcttatcacatcttgaattcaggaggagtcttgtttataattgaagagaaatgatcacaagttaaggagaaggccatgaacgagaccattaagacacaactcaatcaccgcagcatccgtcaatttaaacctctagctttgacacaggaagaagttgaccttctggttgatgttgccagacatacggcaactagtaattttaggcaatcctattcgattatcagtattactgatcaaaaattgaaggaagaaattgctgaaattgcgaatcagccttatattccaaatgctggtcatctttttgtatttgttgtagaccaaagacgtaatactttgattgcagaggcaaagggtgctgaagccttggtgcaaggtagtcccgaacgctttatctcggccttttcagatgcaatgattgctgctcaaaatgtggtagtggctgctgagagtttaggcatgggaacagtcttcttggggagtatcttgaatgataatgccaagatttcggagcttctcaaactgcctaagtatgtctatcctgcagtaggcctagcagttggttggccagaccaggaaccacagcttaaacctcgtttgccacgtcacgtcatccatatggaaaattattatcaggatttagaaaatcctttagaggagctaaaagattacgacgctgaagtccatgagtattacgacctacgcgatctcaataatagggttgatgaatttacgactcagattgctaagaccatggataaatccgttgccaatcgtgctaataccttgaaggatcttcaaaagcagggatttttcatcgactaaaaaaacgactcccataagagtcgttctacaaatcgaatagtgtcatagaggaaaggaactcatttgctagttcctttttttcatattctaaaaactccggccgtttcttgactaggttgtaacgcttggagaggttccatgttccagtaggattgagttcagggtgattggaaacaaagtcaatggttaagtcccattctcgtcggtatccaagaggacgcgagtgataggttacaccgtcaatagttactgtcccataactgcggtgggcatgaccaaaaacaacatctttaacaccatgtttgacgaaaatctgatggaattgttcagatcccaaataagcgttaaaaggtttaaaacgttcgtgcgtcatggtgaaacggctatgaggaacaaaatgcatggcaactataaggttacgagtgtttaatttacttaagatattatctagcttcttgagactagtttgacagatttccggatcagtacctaaacgcttaagtcgtcgatcgaaccaaagttgtttcttacgtttaaaaatcttatccaatttttcatcagaataggaataatcataccacccgtgaaaagccaataaggtcttacttcctaaatcaatcacctgaaaatcaagattatcaataagctcatcatctaaatcaagcatatcatgattgcctaaattataggtaaccttgaccgccttggacagttttcgtaggaaaggttttgtgtcagcataataatggttagaaatatcaccagcgatatggagatggctaacttcttgatcttttaggcactttattagagtatcgatttcatatgtttcaaagtgattcaaatcaatatgtaaatcactcattactgcaagtcttgtcataaaaacattgtaacaaaaaggttaaggcttgtctctaaatgaagatgatggaaaatacttgcccttggactacattttcattatgataagaatatggatatcaagttagaaatacaaaagatggccaaggaaattggcatctcaaaaattggttttacaaccgctgatgattttgcctatctggagaaatcccttcgacttggagtcgaagaagggcggacaacagggtttgaacataaaaatattgaagagcgtatttatcctaagttgaccttagaatcagctaaaaccatcatttccattgcagtagcttatccgcataagttgccgcaacagccccaaaaaacagaatttaagcggggcaaaatcactccaaattcgtgggggctagattatcactatgttttgcaggacaaactaaaacgcctggcagaaggtattgaaaaactgacggaaaacttcgaatataaaggtatggtggacactggggccttggtcgatacagcagttgccaagcgagctggtattggctttatcggaaagaatggactagtgatttcaaaagaatacggctcctacatgtatctcggcgagcttattactaatctagagatagaacctgatcatgaagtagactatggatgtggggattgtcgtcgttgtctggatgcctgtccgacatcttgtcttatcggtgatgggactatgaatgcccgtcgttgcctatccttccaaacccaagataagggcatgatggatatggagtttcgaaagaagataaagactgttatctatggttgcgacatttgtcagatttcctgtccatataacaaagggatcgacaatccactggcttcagacattgatcctgagcttgctatgcctgaattactcccatttctagagctaaccaacaaatcctttaaggagaaatttgggatgattgccggatcttggcgagggaagaatattcttcaacgtaatgccattattgccttggccaacttacatgatcgcaatgctattgtcaaactgatggagattatcgataagaataataatcccattcacacggcgactgccatttgggctctcggtgagattgttaagaagcccgatgaggccatgttagactatatgagggaactgtcacctaaggatgaagaatcccaagccgaatgggagcttgtgtgtgcaaaatggcaaatttaagtgatttatgctagaattaagcataatactataaaatggaggaaacctatccatggaagtggcagaaattcgccaaaaaatctctgaaaatcaagagaagctcgtgagcttcgggaggtctctttgacttagatcgtttggaagaggacattgcgctccttgaaaaccgaatgactgagccagatttttggaatgataatattgcagctcaaaagacttcacaagagttaaatgagctcaaaatgaaatacgaaactttcaacaatatgcaagaactctctgacgagacagagctttatttagaaatgttggaagaagatgatagtgttcaagaagagctggaagaaacgctcgaaaaacttgataagattatgacaagttacgagatgacactgctcttgtctgaaccatatgaccataacaatgccattctggaaattcacccaggatctggtggtacagaagctcaggactgggctgatatgttacttcgtatgtatcaacgttatggaaatgctaaaggtttcaaggttgagactttggattaccaggctggtgatgaggctggaatcaaatctgtaactcttgcttttgaaggacctaatgcttatggattcctcaagtcagaaatgggtgttcaccgtttggttcgtatttcgccatttgactctgctaaacgtcgtcatacctcatttacatctgtggaagtcatgccagaattggatgataccattgaagttgagattcgtgatgatgatatcaagatggatacattccgttcaggtggtgctggtggtcagaacgtcaacaaggtttctacaggtgtgcgtttgacccacattccaacgggtattgttgtagcttcaacggttgaccgtacacaatacggaaaccgcgaccgtgcgatgaagatgcttcaagctaagctctatcaaatggagcaagaaaagaaagcagaagaagtgaatgctttgaaaggtgataagaaagaaatcacttggggaagtcaaattcgctcatacgttttcacgccatataccatggttaaagatcaccgtacaggctacgaagttgcccaggttgataaggtaatggatggagatattgaaggcttcatcgatgcctacctcaagtggcgcatggaagaatagtaataacatacttattttaagtattaagatactctatctcaatgaaaggaaggcgttcagctactgtagtagttgaaaactgacattatggctcttattgaattaaaagatgttactaagaagtatgataagtcaacaacagcccttagacacattgatttgtctgttaactctggggagtttgtttacttagtcggcccttctggtgctggtaaatcaagtttaattcgcttgttctaccaagaagaaaaattaacgagtggttctatgaaggttggagagtttgatttaactcgacttcgtaagaaagacgttccactcttgagacgttccattggagttgttttccaggattataaactccttccaaagaaaacagcttttgaaaatgttgcttatgccatggaagttattggtgagaaacctcgtcatatcaagaaacgagtggcagaagtactcgagttggttggtcttaaacacaagatgcgttcgtttccaaatcaattgtctggtggtgagcaacagcgtgtcgctattgcgcgtgctattgtaaataatccaaaagtgttgattgcggatgaaccaacaggaaacttggacccagagatttcttgggaaattatgcaggtccttgaacgtattaacttgcaagggactaccattataatggcaacccataactcaactatcgttaataaccttcgtcatcgtgtcgtagcgattgaagaaggacgtattgttcgtgatgaagaggaaggagagtacggttaccatgattagacgctttttccgccatttaggagaatcaatcaagaatctcaaacgtaatttgttgtcgacacttacggcagtattttcggtaatgatcgttctttcacttttaggtgtctttggctctgttatcttaaatacacagaaattggcttcagatattgaaaagaatattcaggtcaatgtctacttggatccagattcatcagatgcctcgaaaacagtcaaggaactttctggacagattgttgctaataaagactaccataagatttatgatgctttgaccaaaatcaaaggtgtagataaggttactttctctagcaaagaagaacaaaagaaacagctcattgaaacaatggggtcaagtttcgaaacagcgacaggggatgctaacccactatctgatgtttacatcgttcaaacgaaatcaccagatgatgtcagtcgagttgccaaggaagctaaagccattcagggcgttgataatgctaactttggtgggtcagatactgaaattctgatgtctactatgaaacgtgttcaattttggggaattattgccacagctcttttaacgattgtggctgtcctattgatttcaaataccatccgtattaccattatgtcacgtgcgactgaaattcaaatcatgcgtttggtaggtgccaagaattcatatattcgtcgtccctacttgatggaaggcgcttggattggtgcacttggtgctatcattccttcaggcctcatttatcttttgtatcacatggtttactcatctttgaaccctgattttgtcaaaggtggtatttcgatgtatgatccagagtggtttgtttatgcggttatcggaaccctctttgcagtcggtatcattatcggttcgattgggtcacgtatggcaatgcgccgttatttgaaatactaaagagattaaaggagaaccaatttggttctctttttgttttgtccggagattcagaaaagcagattttcaactatatctcaaaatcgtttgctcaaagcccaaatccaaacccatatttggtataatattaaaaaacattggaaaagagatgcattatgacaaagttagctaccatttgttatattgacaatggaaaggagcttttgctcctacatcgtaataaaaagcctaatgatgttcatgaaggaaagtggatttctgttgggggaaaactagaagcgggagaaacgcctgacgaatgtgctcgtcgtgaaattctcgaggaaacccattttacagtgactgagatggattttaaagggatgattacctttccagaatttacccccggtcatgattggtatacctatgtctttaaggtaactggttttgaaggagaactcatctcagatgaggagtctcgtgaaggaacgcttgaatgggtaccatatgatgaggtcttatctaaaccaacttgggaaggtgactacgagattttcaagtggattcttgaagataagcctttcttctctgcaaaatttgtctatgatcataaccaaaacttagtagacaagactgtaaccttttatgataaatagggaggaactatgaagcgtaaaaaaacagaacatttttcagaaacatggttttttaagtggatattgaataatcaggctgttgtagcctttttcatcttacttttgattggtttgacggttttgattttcaccaagattagtcctattttttcacccgtcatccagtttatgaccattattatgttgccattggttatttccatgctcctttattatttaataaaacctttggtactacttgtagaaagaactggactaaaccgaaccatctctatcttagtcatctacgctatccttggtttgctcttggtttggggaatttcgacggctattcctagcttacaaaatcaaattttgatcctaataagaaatgcaccctcatatattgcacgtgccaatagtgagacggaacgttggattaatctccctattctttctaacttccatggtgatctagagtccatgcttagtgatttctcagcgagaatggtcaactatgctgagaacttttcttcatctgctctgacatgggttgggacttttgcgagcacagtagcaagggtgacagtagctatcattttggcacctttcattctcttctaccttttaagagatagccaaaagatgaaacatagctttgtctcagccttaccaactcgctttcgtgaaacaactgttcgtatgctttcagatattaatagtcagctcgaagggtatgttcaaggccaggttacagtcgctattgtcgttgccattatgttctgtattatgtttaagattgtaggtcttcgatatggtatgacttttggtattatggcaggttttctaaacatggttccttatctaggaagttttcttgcgatggtaccagttgtaatcatgggactggtgcaaggacctgctatgctgatcaaggtcctcatcatttttgtcattgagcaaactattgaaggacgttttgtttctccacttgttttgggaaataaactaagcattcacccgattaccattatgtttattctcttgacagcaggctctctgtacggtgtttggggcgtcttattggggattccaatttatgcctctgtcaaggttgttgttagagagatttttgattggtaccgttctgtaagtaatctttatcaagatgatctagaaaatgaaggacaaaaagacgatgttaaatagtgaaaaaatggttgcctctattggaaaccaagatttagaccacgcagacaaatattttaaaaaagctttacgagaagatcctgcagaggttcttgttgagttaggtcaatacctagagtctattggtttcttaccacaagcacaggaaatttacgaaaaagttcgttttgattttccagaggttaatgtcaatctagcacaaattgcagccgaagatggtgatattgaagaggcctttctttatttggatgccatacctgaagactctgacgactatttgtctgctttaattgtaaaggcagacctctatcaaatggagggcttaactgatgtggcacgtgataagttgttggaggcaagtcaattatcagatgactcattgattatttttggtttggctgagatggaatttgaacttggaaattttgaacaagctattcaatactatgctaaattagataatcgtgacctcctggcaatgactggcgtttctacttatgaacgcattggtaaggcttatgccagtcttggtaagtttgaagctgctcgtgaatttttggaaaaagctattgaaattgaatacgatgataccattgcttttgagttagccactttgctctatgatcaagaagagtatcaaaaagctaatttttactttaagcagatagaaaccatgtctgctgacttcgagggttatgagtatttttacgccttgtccttacatgcagaacataaaactgaagaagcattacgtatggcacaacaagggatttcaaaaaatgcttttgatgttcaattacttttgttagcatcacagttatcctatgagttgcatgacactcaatctgctgaatcttatctgaagcaagccttaccactagctgaggaccaagatgagattgttctacgtttaagtactctctatttggaagaagaacgttacgaggatctagtagctttagccgattacgaagttgattctgttttggctcgctggaatattgccaaggcctaccaagcacttgatgatgaagaagaagcttttcaaatctatcaagatttggctacagatttatctgaaaatcctgatttcctccatgattatgcatatatcctgcgtgaatttggttacagagatcaggcgcgtgcaacggcagaaaaataccttgccttagttccagatgatgtcaatatgcaaacatttcttgaggattattaagatgcgaaaggctttaattcttggtttaaagagagggagagatacattgagcttgttcactccctctttttttatttctctatttatgttatgattttattagaacccataaggagtaagtatggttaagagagatttaattcgaaatattatcatagcagttcttgccattgtagtgattttgttgttaagagcatttgtcttttcaacacaccgtgtgactgaaggtcaggcgaatgactatattcatgctggtgattatgttactttcaataaaaatgttgaacctcagaaaaaagattttattctttatacagttaatggcaaggaatatattggtcgtgttattgctgatgggggcaagagcgtgacagctatggatgatttcctttatgtcaatgataagtcagttgacgaagcctatattagcaaggataaatcagcttatttggcgacagtttcacctggaaacttcttcactgatgatttttccattgcaacattgacagataataaacaaactaagattgaaaagggtcaatatcttgtactgaacgataaccgtcgtaatacagatgatagtcgtaagtttggtcttattgaaaaggaccaaattaaaggtgttatctctttcagattgtatcctctatcacgttttggtttcgttgatgtcgattaatatttcaatactactaaaaaagctaggaacttttgacaagtttctagcttttttttgcgaataaattggtgaaggtttattttaagactttatgatgctgatagtttcatcgtcttaaaatgaattagcagaaattgtaagtagaaaaggaaattaagatgcaattaggatttcattttggatttaagaaaagcaaagcttatggactgtgcggtgttatgctagcaatcttatttttaggcatgtctggtcactcggcgaaagcagatgaaatgttatcaccaactgacacatcttcaactttgaaagaaagtacagagaatcacgaggcgagttattctgaagtaggagtacacgataattcaacgagtcaaatgaatctacaaagtgaaaaggtattagaggaggagcaaacaagtctggcagattcttcaaaaatagctgtcttaaccaatagttctgtgaccacaagctcttatcaagaggcagatgaacttagcgaaattgatcaaaatcaaagtcattttcttagtgccattaagcaaggagctatggatggagccaaggaaggagttcttccctctattacggcagcacaagctatcctagaaagtggttggggaagctctgaacttgctaaggctcccaacaataatctttttggcattaaggattcagaggactggaatggagaaattgtgactgtgcctacccaggaatatgttaatggtgactatatcaccgtcaatgcagcttttcgaaaatatacctcatggaatgatagcgtagtagaccatgcaaaattttttacgagtaccgagtggcgaaaaaacaattaccgaaaagttgtgaatgaaacagattatcgcgttgcggctcaggaacttaagaatgcaggatatgcgacagatccaagttatcccggaaaacttatctctttgattgaagcctataaactttatgaatgggatgcagtaagtaatacgaccaattctgtccttgaaaatgaaggagtagagagccaagatcccaaagcggaccttgccatcactggtctcaacaatgctacgggtagctatgatcttgtcatttcaaatttagttgccccacgaggttttaaagaagtcctagttccaacctggtcagaaaagaacggtcaagatgatatcatctggtacaaggcagccaagcaagctaatggagactataaggtaaccgttcgctcaagcaatcataagggagatagtggtctttataattcacatgtctatttggttgacaatgatggtaaattcattggcttaggtggcaaacaagtgacacttgatattactaagactcaaggaaccttaactattgctaacaatgataaaaatcgtgggacctttgatgttcttatcaccaatctgacgaatctaagtggtatttcaggtgtccttatcccagtctggtctgagcaaaatggtcaggatgatcttgtttggcataatgccactaaacaggatgatggttcttacaaggtgactatttcagcaagccaacacaagtggaattcaggcaagtacatcgttcatggctatattgttgatgcttcaggtaagaatatcggctttggggcaacttcagctgatgtggtggcacctaagaaaatcggttcagcatcaagtgggaactacgatgttttaaataagattgtctatctcgatgctggtcatggtggctatgatccaggagcttcttactttggtatctctgaaaagagcttgaccttggctatccaaagccgcgtgaaagctaaactagaagcagaaggctatcaagttgtaaccactcgcacaagtgatacctatgttgacttgacggatcgctctcgtgcagccaatgcttctgaatcagatatcttcgtaagtatccacatcaatgcttcaggaagttcagcagcacaaggaatcgagacttattattaccaaccttatgcagaatacccatcacgtattaatgcgacctaccatgccaattcaactcgattgagcatgagtgataccttggccaatgccatccagtctagcctgattaatgcgactggtgctcagaaccaaggtgtgaaacgtcaaacctttgcggtcttgcgtgagacaacagcgccagcagtccttcttgaactaggtttcttgtcaaatcctcaagaagcagcccgtttgaatacctctgcttatcaggagactttagctaacgcaatcgtggcaggtattaagtcttactacgaaaaagaatctaaagtttaagttatacgttaacccatcattatgatgggtttttatgctataattgaggtaaatactaaatacaacaaaaggagtgcttatggcctacgatttactcttagagcgttttttacgttacgtaaaaatcaatacacgtagtgatgaaaatgcaacaagaacgccaacaacacaaagtcaggtggattttgccttgaaggttttaaaaccagaattagaagaactaggtttaagtaatatccattatttggaaagtaatggatacctagtggcaacccttccggctaacgatgaccagttaacacgtaagattggttttatctctcatatggataccgctgattttaatgcagagggagtgtcaccgcaagtcattgactcttatgatggaggtatcattcctcttggaaattcaggttataacctagacccagctgattttccaaatctcaagaattatgtcggtcagaaacttattacgacagatggtaccactcttcttggggctgatgataagtcaggtattgctgagattatgacagccttggcttatttgaaggctcatcctgaaatcaaacattgtgagattcgtgtaggctttggtcctgatgaagaaattggaatcggtgcagataaatttgatgtcgaagattttgatgtcgattttgcctacacagttgacggtggacctttgggtgaattacagtatgaaactttctctgcagcaggagcagaacttaccttccacggacgcaatgtccaccctggaacagcaaaagaccaaatggttaatgccttgcagttggcaattgattttcataatcagttgccagcagaagaacgccctgagttgacagatggctatcaaggtttcaaccatcttcaaaccatgacaggtactgttgaggaagcaaatctttcttatatcatccgtgattttgaaacagagtcttttgaaaatcgtaaagcagtcttccaaaaaattgctgacgaaatgaataaagctcatggtcagacacgagttgatttggtacttaaagatcaatactataatatgcgtcaggttattgaaaaagatatgacgcctgttgagttggctaagggcgttatggaggaattggaaattacgccagttattgaacctattcgtggtggaacagatggctcgaagatctcatttatgggtattccaactccaaacctttttgctggtggcgaaaatatgcatggtcgttatgagtttgtttccttgcagacaatggaaaaagccgtagatgttattcttggaattgtcagtaaaccttaattgagcttgctaaatactgattttatggtaaaattagaagtaatggaggtgctgagatgataaaaattttcggcaagtatcgttaccattggcaacccgaattatcttggctgattatctactggtctttagccatcacgccaatctttattgcggcggcccttctattcgagttgtactcggtgccctcacatattttgatgctcttcactattttcgttgccttgtttggtttaggtttccatcgatactttattattgaagatcatgggattctgcgtattgtttcttttaacatttttaaaccacgcaaagtgaaaattagtgatattgaaaaagtcgaagtgattaaaactggcttgtgccttatttttaaaaatggtaaaaaacgtcggttttatatgagaaagtggcctaagaaatatttcttagatgcattagcccttcaccctgatttcaaaggtgaggtagagctattggatcatatgactaactttgattactttgccttttatgaggaatcaaaaaaagccctgaagcttaaacttcgcaaataagggctttagtgggacaagacttgacggcagtcaaagtctcagggctattttcaataatttgattgagttggtcgctgtctctgaacctaacaataccttcgtcatcataatcaaagacgggagagtaggtttggcacaaaccacaagcgatacatttttctggaattaatgatactttcatagtattattttaaaatagatttattgtttttacaaggagaatatcatgagtaaaaaaccatgggaagataaggtttctgatgaagagttggaagaagtagttgacgctgattttctagatgatgaagatgagtttgaggattatgaagatcttgaagaagaggatgtcactccttcagatgaaaaacgcgaaaaaggtggcggcttcattaattcatcattcttgacagtcttgcttggattattctttgttattgttgtatgtattttgttctttgttttctatacttcaaatgttggtggaaacaaaactgcggaatctaaggaatcatctggattctactcatcttcaactagcaaagttgttaaatcttcatctagcaagaaagactcaaacaaagatgaggaaagtgagaaatctactgcagaaaaatcttcaaaagagaaatcatcttcaactaaagcatcaagctcttctaaacatgtagaaaaagaagatgcaactgagtcagctgagacagcaccatcaagtgctacggcagcagcagatggttcatcaattgttgttcaatctggtgaaggtgctggttctatcgctgcacgtgcaggtatctctgtagatgaattggaacgtcttaaccctgatcacatgacaagtggttactggtatgctaacccaggtgatgtggttaacgttcaataattttaaaagcaaaggaacatcatgaaagatattagaattgctattgatggtcctgcgtcaagtggaaaaagtacagtagccaagattattgcaaaaaatcttggctatacttatcttgacacaggtgctatgtaccgatctgcaacttatttggccttgcagaatggtttgactgaggaaaatgtaccagaaattttggagcaactatctcaacatccgatttcattcggaaaagcagcagatggtagtcagcaagtttatgttggtgatgttgatattacacaccccattcgtgataaccaagtcacaaataatgtttcttgggtagcagctattcctgaagtgcgtcaagaactcgttgcccaacaacaacgtattgctcaagatggtgctattatcatggatggtcgtgatattgggaccgtggttttgcctgatgcagaactcaaaattttcttgattgcttcagttgatgaacgtgcggaacgtcgttataaggaaaatatcgaaaaaggtattcccgctgaccttgagactttgaagaaagaaattgctgaacgtgactataaagatagtcatcgtaaggtttcacctcttaaaccagcggaagatgccatcacttttgacactacaggtgtatctattgatggtgttgtggaatttattcaagaaaaagcaaaaaaaattattgacaaaggatgactcacttgttatactattaacaatgagaaaagcagaagtgagaacttctcgccttgcgacttaggttgtctggcccaacatgtcaaatccctatggggatattatgtgtgcgggcttgtatatcaagtccgctttgtttttctctaaaaaaataaagaggtgaagatcatagctaagaaagatctattcattaacgatgaaattcgcgttcgcgaagttcgtcttgttggtcttgatggtgaacaattgggaattaaaccattgtcagaagcgcaagctattgcagatgatgcaaatgttgacttggttctcatccaaccacaagctacgccacctgttgcgaagattatggactatggtaagttcaaatttgagtatcaaaagaaacaaaaagaacaacgtaagaaacaaagcgttgttaccgttaaggaagttcgtttgagtccagttattgataaaggtgactttgaaactaaacttcgtaacggccgtaagtttcttgaaaaaggaaacaaggttaaagtttctatccgattcaaaggtcgtatgattactcacaaagaaatcggagctaaggtcttggcggaatttgctgaaaaaacgcaagatattgcgattattgagcaaagagcgaagatggatggacgtcaaatgttcatgcaacttgcaccaattcctgacaaaaaataattgtcaaactaacactattttaagaggagaattttaaaatgccaaaacaaaaaacacaccgcgcatcagctaaacgtttcaaacgtacaggttcaggtggattgaaacgcttccgtgccttcacatctcaccgtttccacggtaaaactaaaaaacaacgtcgtcaccttcgtaaagcgtcaatggtacattcaggtgactttaaacgtatcaaatcaatgctttcacaaatgcgttaatccgctacaagcattacaaattaactaaactagaattaattcggaggaatatataaatggctcgtgttaaaggtggcgttgtatcacgcaaacgtcgtaaacgtgtattgaaacttgctaaaggttactatggtgcaaaacacatcttgttccgtactgcaaaagaacaagtaatgaactcttactactatgcataccgtgaccgtcgtcaaaagaaacgtgatttccgtaaactttggatcacacgtatcaatgcggcagctcgtttgaacggtttgtcatactcacaattgatgcacggtttgaaattggctgaaatcgaagttaaccgtaaaatgcttgctgatttggcagttaacgatgcagcagctttcacagctcttgcagatgcagctaaagcaaaacttggtaaataagaattaagatgggttttacccatctttttttatggaggtatctatgattcgtttagcaagagcagaagatattccaagattacaggagttattggggcagattcttctagtgcatcattatgcacgtcctgatgtatttaagtcagagggcagtaaatatacagatggagagttagaagcagtgattaatgatccgactaaacccatttttgtatatgaggatgaagaaggccgtatcttaggtcatctattcttaatgattaaagaagtatctgataataatggtccactaaaggctgttaagactctttttgttgatgatttatgcgttgataaggaggctcgaggtcaaaaattaggagagaagctttatcaatttgccttggactatgctaaggagctaggttgttataatctgacacttcacgtatggaatgataatgagggagctgtacgtttttacgaacgtttaggtatgaaaccgagatatactgaaatggaaactatcctaaaataatacgttttcatgagagaaatttaacttacgaggaataaaaatttttgatatgctgagagagaggttttagaaatggagaattttaatgcctcgtaattttaaagaagctttgctttttacgattttaatgtgtggaatgatggtctgtgggatgagtctctggaatcttcttatccttgattggactggagttgttccctttgcttggggtcactttttccaaggttatcttcctggatttgtagttgctttcttactggatatgcttttggtaggaccactagccaagacaattgcatttgcaattttacataaagtaaaagcccatgataaacgatgggcgaagattttagtgatttctggaaccatggcgctattcatggtaacctttatgtcgctctatggattagtgtacaacggtcagtcggtgacattttcatcctatggtcgtgcttggttgacaaatgttatcatggccttaccacttaattttctagtagttggtcccatctcacgctttatcttgggaaaactgcaaaaaccattgcctggtgaagaagttgtagagaattttgaagacgatgacgaattaccaactataatttaagtatagaactggagagaaactccagtttttttatattaaaagcagccacggatgtgactgcttaatgatgattagtttttctttttcatttcaccatgtgggtagtaagttccctctggcatatcgttaatgaaaacatgaatagcttctttaggggcttttgcaacacgtgatacaacctcagtaacttcacgagcaagttcgattttttgttcttcagtacgaccttcaaagagatcaatttttacaaatggcataatacatctccttagttttgatagtcctattatagcattaattaagagaatattctaaagtttttggaaattcttgtaatgatattatcgtaatgctaaaatgcgaatgatttcaatagtaaagcctaaagtaaaaagaggccggtagctaagagaaagtgttcctagttgaaagcaatagtattacttttgattcgatcattactgatttaagaaatgtttcacatgctattcgaaatagtaaggcgtcttgtgatgataggtaagagatagcattttttattggctttatttataaaggatgaaaactcttactaaaaatggtaaaataatgctaactagagacagtaaggagtaaattatgacaattgattttcgtgccgaagttgataagcgcaaagatgctttgatggaggacctttttggtcttttgcgtattaactcagaacgtgatgatagtaaggttgatgataagcacccatttggtcctggaccagtaaaagctttggaacattttcttgctttagcagaacgtgacggctataaaactcgtaatatcgataattatgctggtgactttgaatttggtcaaggtgatgaagttttgggtatctttgcccacttggatgtggttccagctggtagtggttgggatacagctccttatgaacctgtaatcaaagacggtaaactttatgcccgtgggtcatcagatgataaaggcccaacaatggcttgttactatgccttgaaaattattaaagaactcgagcttccagtatctaagcgtgtgcgcttcattgttggtactgatgaagaatctggttggggcgatatggaatattacttcgctcataatggattgaaagatcctgattttggtttttcacctgatgcagaatttccaatcatcaatggtgaaaagggaaatattacagcttatctccattttgaaggtcaaaatgatggggactttagtcttgtgtcctttaatggtggtttgcgtgaaaatatggttcctgaatcagcaagtgcagattttactggacctatcactttgaaagaacttgaagccaaattagccgactttgtttcggaacaagaagtaactggtcaagtgaccgaagaagcaggtgttttccatgtgactattcatgggaaatcagctcatggtatgatgcctcaaaatggtattaatggagcaacctacttggcactcttccttagtcaatttgatttccaaggcaatgctaaaacgtatttggatataattgctgaaacacttcataaggatttcttcgctgaaaagacaggtcttgcttatacagatcctaagatgggtgaattgaccatgaatgcaggtgtatttaacttctctaaggaatcagaagaaaatacgattgctctgaatttccgctatcctcaaggggttgatacggactctattaaggctgatcttgaaaaactcgaaggtcctaaggcggttagtctctcagaacacggtcatgtgccacactatgtaccagttgatgatcctatggtagagactcttctttcagtctatgagaaacaaacaggtcttaaaggtcatgaacaaattattggtggcggaacatttggacgtctcctcaaacgtggtgttgcctatggagctatgttccctggttatgtcaacacgatgcaccaagcaaatgagtttactgaggttgaagacttgtaccgtgctgctgccatttatgcagaagctatctatgagttaatcaaataaaaaagagagacagttttgtctcttttttgaggaggaaaatatggaaacacttgaagaattaacacaagcaatcatgtccgatgaacaaaataaagcttttacggaaaaaggtataaaacccttgtttaccattccaaaaacggcacgaattaatatcgtaggacaagctcctggtattcgtgcccaagagtccggcctttactggaatgatcctagcggtgataatctcagggattggatgggtgtttcacgcgaagaattttatgaatctggcatgtttgctattgtgccaatggatttttatttcccaggtcatgggaaatcaggtgatttacctcctcgcaaaggatttgcagataagtggcatgagaaagttcttgctttagctcctgatattcaattgacgattttagtaggtaactatgcacagcgttactatttacatcaaaaatcgtcggcaaaattaacggatacagttaagcattacaaagattaccttcctgagtttttccctctcgttcatccctctccacgaaataatatttggcaagccaaaaatccatggtttatggaagaagtagttccagatttgaaggccttggtcaaaaaaatcttaagtcaatgatttctgatatataaacttggattgtcattaggtattgttatcaaattaatgaagcaacattcagaacatgtccaaatggtataaaaatggctctttgtcaactgtagtgggtgacgaaaagctaacatctagagaggaccagataggtcttctctttttgtatattcagagtgatgaaaacacgcttcctaaagttgataaaatttttaaaaccgaagcccagacgtttaatatctttgataagcttattggtcccctccaattttgcatttgagtaatgtgtttctagtgcatttttgatgtattgtttatgtttacgaaaagtcctaaagactgttttgaagtaatgattgaccttgcttatattctcctctatgagttcaaaaaactcatcccctctcttctcctgaaagtgaaaaagcaaaagctgatagaggttataataattggtgagttcttctgagaaattcagtgtcttctcaacgacttcatgtgggcataatgtttgatggaaggtctttgagtaaaaagggttgagagataacttacggctgtccttttggaagagtctccagtgattttttaaagctcgataaggtagcgacttcttatcaaactggttcataatcgcaattcttgtctttaaaaaggctcgaccaaggtgctgaataatgtgaaatcgatcaagaacgattttggcgtttggaaagagcttgcgagccagtggcatataagctccagacatatccatagtgataaactgtacctgttgtcggactttcaatggatacttcaaaaagtagtttcgtatagtagtttggcagcgattatcaagtatagttatgagttcgtttgtctcatagttctgtgccacaaaagccaattcccctttcttgaagccaaactcatcccaggacataatagctgggagtttgtcataatgttccttgaaagtaaactggtcgagtttacgatagacagtggacgttgacacgcgaagtcttctggcaatatccgttaatgacaccttctcagttaggagttgtgtaaccttttgtcggactagattggagatttggcagtttttctcaacgatagatgtctcagctaccgtgactcgtctacaacttttacactggaaacgacgttttttcagacgtagtagtgttggagttccagcttgctcaagaagagggattttagaaggcttttgaaagtcgtacttgatcatctttccatggcaatgaggacatgatggtgcaggggaatcgagttttgcttgaatctcgatatgagtatcagtttcaaaaacaagtgaaatattgatattttggtctttaattccgattaattctgtggtattcttaataagtctcataagttcttcctaatgatggtttggttgcttttcattatagttcttatgggactttttgtctgcattcaaaaagctctataatctctacagtagttttacccactacagaaattatagagccataaaaatttgagccccttggggctttttttgatgctataacaaaaatagttgcaaaaataattaacaaaattttaatacttagcttatacagtgcaatttaattctaattttcagaagaagtaacatataaaattaaggtagctatccttttaaactaaagaatcaattaaataatacttataaattgaaaatgagtgtaaatttttaaaaatattaagacaattccattgacagaaagtttaaaagtgatagactttaggtgttaagaaaatttagaaggaaatttgtgatatgggaagaaaagattcacaacgtttttcaatcaggaagtatagctttggggctgcttctgttcttttgggtacaaccattcttgcgatgggggcaactggtgtacatgcagatgaggtttcaacttcagctgctactgatacaccacttagtgcttctgtactaacagacactgctgctgatccggcaacgactgttgatcattcagagaagcaagttgtttctgtcaaagaagaaggaaataccactgtaacaacaagtgttgttacaactgatagtcttgaggatgctaaaacttctgcggtaaaagaaggggtagaagtcgaagaaactgcacctcaaacacatacatccctagagggtgctattgctgacaatcaagctcaatcaaaagagattaacacggttgtttcggattatcagaaagcaaaagaaaaccacaaaaaagatgtagctgagtatgataaagctaaggctgagtacgatgctaaagtggccgaaaaagcagcagctgataaagcaaacgctgcttctaaagcacagtatgatactgatcaagctgcttatgaaaaagggttagctaaataccaagctgataataaagcctatgatgtagcattgaaagagtataatgctcaaaaattaacttatgattctaaagtagcagaaaaagcagctgccgatgcagctaatgctaagtcagaagctgattataaggtacagttggctgtttatgaaactgctaagaagaactatgaagctgctatggctcagtatagcaaagacaaggcaaaatatgatgctgagaaggaagcttatgatgctaaagtagctgaaaaagttcgtacagaaatcgaaaacaaggctgctcaagagcagtatgagaaagatttagctacgtataatgccgcttatgaaaaatatcaaaccgatttagctgcctacaagactgccaaagtagcctacgatgctaaagtagccgaaaaagcagcagctgatgcagctaatgcagaagctaaagctaagtatgatgcggaaatggtcacttacgaagcagccttgtctgaatataagacaaataaagctttgtatgatgccgctctagctgaatacaatacgaaaaaagcagcttatgatgctaaagtagctgagaaaacacaagcagaaattactgataaggcagctcaagagcaatatgagaaagatcttgctgcttacaatacggcttacgaaaaatatcaaactgatttagctgcctacaagactgctaaagcagcctacgatgccaaagtagccgaaaaagcaactgctgataaggcaaatgcggaagctaaagccaagtatgacgcagaaatggctgtttacaatacagctaaagcgcaatacgataaagatttacaagaatatcaagctaagaaagcgcaatacgataaagataaagcagcctatgatcaacttgttgctattaaagcagaagaagatgctgcaaaagctaagtatgaggttgagcttgcaaaatacaatgtagatttagagcaatacggcaaagattttgctacctaccaaacaaaacttgctgaatatcaaacagctttgacacagtacaaagatgctaaagcagcctatgataagtacatgaatgataatggtttccaagatctaaaagatgtagaaactgttcaagatttgaccttccaacgtgaaggtggagccattcataccatcgatggcatcagtgcttatctcactcgtgatgctcaagctcgtttgaatacaagcaatgtacatcagtatgattccaataaattggaagcttcagatattgtagcaactagtccttgggccaataatgaaactgagtatattcaagttaaggaaggcgataaatttgttgttacttatgataacttgaatcagtcaagcatgcgtgaaaatacggatatgcatccgatcaagcgcgtgatttatcgctatgaaattttgagtcttccatcaaatgacggtaaaggaattgcagccgttagctcagacccaactgtaacactaacagtcggtgcttcaacagaccaaaataaaccagttaaggtggctgtagatgttgaattctatgatggtaatggcaataagtttgatttgacacagcacaatgcgattgtagcgttgaactctcttaaccactggacaggtgcttcttatgtagatagtggggataaacctcgtgcccttacagtagaagccaaggataaaaatggtaacactgttcgaggaacttggaatccatatgcagatggttcatcaatgagcattgaaaacaatgcagttgttgttaaaaatggaacagctgactttggtactgctgacgtcactatctctgctgaaaacccaatcaagattgtggcacaaaaagcaacgtggaatggtagtgaatttacagttagtgaagaaactgttattgacgcaacttcagtcaatgtttcaggtgctgggaatggtcactctattggaacagctgagttcacattagacggtaaagatgatgtgattggttcttacactattgatccaacttcaggacgtatcatctttactcctaagaagaaatttgaaaatgtagaacaccaagaatctgtaaatgttggaaacaataaatacattccaattccaaattcaagtgtttcttatgattctgctacaaaagaggtgacatcatttaaagataaccaatacattgaacatggatctatctttaatggtgaatcttcaacgactcttgaaggttgggacaatccatcttctccatacctctattatggtggagcaggcttgaagatggctgatggtcacttggtatttacggccaatggagctaatgcatctggtcaaccaacagtatattggtttgcgattaactcaaatgttggtattccaaaaaatccaggtgaggcaccaaaagagccaacagctcctgaagaaccaaaggctccaacaccaccaacgattacactggaagttcttccagcggtaccaacagaaccaactccgccaacagcccctacggcaccaacagaacctaactatacagttgttacagttgatgctgaggagccaaaagctccaacagagcctaaggctccaacgccaccaactccgacagttgttgaagttcctgcggaaccaagcaaaccagaagaacctaaagcgccaacaccaccgacagaacctaactacactgtggttacagttgatgcagaggaacctaaggcaccaacagaaccaaaagcaccaacgccaccaactccagctttagttgaagtgccagtagagccacgtaagattacggcaccagtagaacctaaggctccgactccacctacacctgtagttgtagaggtacctggtgagccaacaaaaccaacgccaccaacagagccaacagctccaacaccaccaactatggtcacagttaatgttcctaataaacctgtttcacctaaagaacttgtagctcctaaggtaaaatggcataaaaattatcttgttgagcgcgtaacacgtccagtaccaacgacgccaccaactcctcaaaaaccaaaaactcctggaacacctacaggaccaagcgttacaccaacttcttctgtggttgctaagcaagaaacagaaagaactaatagcgccgtattgccagaaacaggtgactctaaccaaaaattagcatctgtaacaggtctaggcttgctttcaatggccctttcaggtctatggtcagctcgcaaacgtaaacattaataagataaaatgaaagattaggttgttttgctatgcaagacagtctagtctttttttgttacttattctttgcatattatcggctataaataagtttaaatgttaaaactaataggggaaacgagatgacatgatttaggtgaaagagctatccaaaagctaaatatcacaatgaaaagtaaaatgaaagcttatagttgattgtttttcataatcttttcaataaaaaaacattaaagcgaattggactagatattataaaattaaacctcctatttgtatcgaaaatgctattaattatagggttttgtctatcaaatattttgatattaaaaagtatttgaatttaagaatctaatcgaatttaaaggaatgcgtgtttttatgagatatctcaaattgacatggttctttcttttgttagaatatgaacataactaaatatagaaggacgtaatttaaatggggaaaaaggaattacaacgttattcactcagaaagtctagccttggtgcggcttctgttcttttggggactgcagttcttgcagtaggagcttcaaatgcaagcgctgatgaggtagcaacaactacagattcagcaacaccagcagttgaagcaacagatgttgttgaagaaagcacttctgccgtagcagattcaactgaaaagaaagttgttaacgttactgaagaaggcaacacaactgttacaacgagtgaagtaacaaatacaagcttagaagctgcaaaaacagctgcaactaacgaaggggttgaggttaaggaagaacctgctcaaaccaaagaaactgttgaagcagctgctgcagataataaagcacaagcagagaaaatcaatacagtcgtttctgattataaagcggctaaagaacaatacaagtcagataaagctgactatgataaagcaaaagcaaactatgatgccaaattagctgagaaagcacttgctgataaaacaaatgctgaagctcaggctaaatatgatactgaaaaaacagcttatgataaagcttcagagcaataccaaattgctaagcaagcttatgactcagctctttcagagtacaagactaagaaagttacttatgatgctaaggtagcagaaaaagaagccgctgataaagaaaatgctctttctgcagctaaataccaagcagaattggcaacatataaccaagcaaaagctgattatgaagcagctcttgctcagtacaatagcgataaagccaaatacaacgctgaaaaagctaactatgataataaagtagctgaaaaagttgttactgagaaacgtaacgctgaagctgaagctaaatatcaaactgagctagcagcatacaatgaagcaaaagctaaatatgatgtagaaaaagcagcatatgacaagaatcttgaactttataacgctaagaaaacagcttatgaagcagatcttgaaacaaaacaagctattgaaaaatacaatgcagatgcaaaagctaaatacgaagctgccttggttgtctacaatgagcaaaaagctaaatatgaccaagagtaccttgagtatcaaaacaaattagctgtctaccaaacagcacttaaacaatatcaagatgctaaaacagcttacgataaatacatgaatgatcctgtatatcgtaaccttaaagatgctgaagttgttcaagaattgactttccaacgtgaaaacgatgcgacacacaaagttgaaggtgtaagcaactacttgacaaaagaagcacaagagcgtcttaacacaagtaatgttttccaatatgattctaacaagttacaagcatctgacattgtttcaaacagtccttggacaaacactgaagacgagtggattcaagttaaagaaggtgacaaatttgttgttacttacgatggcttgaaccaatcaagtatgcttgttgaaaatgaagcatcagcaatcaaacgtgttgtataccgttacgaaatcgttagccttccatcaaacgacggaaaaggtatcgcgaaaatcagtaaggatccaacagtaactatgacagttggagcgtcaactgatcaagataaaccagttaaagtagctgtagatgttgagttttacgataaagatggtaaaatgttcaaccttagtgagcgtaaagctatcgtagcacttaactcacttaaccactggaacggtgcagcatatgttgaaacatctgagcgcccacgtccacttacagtagaagcgaaagacgttaatggtaatactgttcgcggtacttacaatccttacgcagatggttctactttggcaatccaaaacggtgaagttgttacaaaatctggttacgcagattttggtggagctacagttaacatttcagatgagaacccacttaaggtagtggttcctatcactgactggaatggctcagaatgggttgtctcacgtgaaattccatcagatgtaacaactcttaatgcttcaggtagcggtaatggacacgctcttggtaaccaagattatacgtttggtgataaagatgatgttattggttcatacagtgtttctgctgaaactggtttgattacattcacacctaagaaaaaataccaatcaacacgccaccaagaatatgtaaatattggtgataaccaattcatcgctattccaaaatcatcagttacttatgatgctgccactaaagaagtaacatcagtcaatgataaccaatacattgatcatggtgcagtctttaatggtgagacaacatcagaattgacaggctgggataacgctgattcaccttacctctactatggaggtgcaggtatcaagatgactaatggtcacttggtatttactgctgaaggtgcaaatgctgatggcgcaccaacagtttactggttcgcaatcaactctaaccttggtttgcctaagaatccaggtgaaaaacctgaagaacctaaggcaccaacaccaccaacagcaccggttaaaccagtagttaaaacagttggtatcaatccacaagaaccaacaccaccaacacctccaaaagagccagtggcaccaacgccaccaactccagaggtagttgaagttcctggtaaaccacaagaaccaacaccaccaacaggtccaacggcaccaacaccaccaacaccaaaagtggttgaagttccagaaaaaccggttgaaccaacaccaccaacaggtccaacggcaccaacgccaccaacaccaaaagtagttgaagttcctgctaaaccagtagaacctaaaactccagaaaaaccaagtgttgtatggcacaagaactatgtcgttgagagagagtctcacgtggtaccaccaactccaccgactactccacaaacaccaccaacacctgttactcctccaactccagtgacaccaccaactacaccaactccagatactgaagttcctgtagtgcctcaagctgagttgccacaaactggtgagcacactagcaatgctggatttattggacttctttcaatgatttttgcagcctttgtaggattcttcaaacgtcgtaaagaagattaagtggtgctattaaattagttccccatcaaaactagattctatttagaatctagtttttatttttgctaggttttactccttcgtatcatttctatttactggtgaaacatgttataattgttttgagcgactattatagaaagatgcaaggagacgagcatggaagaacttaagaaaattgctggtgtaaccgctgccaaatacgttgaagatggaatggttgttggactcggtacagggtcaacagcttacttcttcgtagaggaaattggccgtcgtattaaggaagaaggtcttagtgttgttggtgtaacgacatcaagtcaaaccactaaacaagctgaaggcttaggcattcctttgaaggcagtggatgacattgacagtattgatgttactgttgatggagccgacgaagtagaccctcaactcaacgggattaaaggtggcggtggcgcccttttgatggaaaaaattgtcgctacacctacaaaagaatatatctgggtggttgatgagtctaaaatggttgatcaattaggtgctttcaaactaccagttgaagtggttcaatatggtgctgaccgtctgtatcgtgtctttgagtctaagggttataagccatcattccgacttacggaacaaggtgaccgctttgttacagatatgaagaactatatcatcgatcttgatttaggtaagattgaaaatccagtagctcttggtgaagaactaaaagctatgacaggggttgttgatcatggattgttcaatggaatggttaacaaagtcatcgttgcaggaaaagacggtgttaaggtcgttgaagttaaggcctagtccgatttttattccctcacctttaataaggaaaactaattaatttttatcaaactattaaataatatagaaaggcaagaggtaatttcgaaaagattttagctctttgtggtgttattatgtccaaatttaaccgaatgcatttagtcgttcttgattcagtaggaattggtgctgctccagatgccaatgactttgtcaatgcaggtgtgccagatggtgcttcagatacccttggtcatatctctaaatcagtaggattgaatgtgccaaatatggctaagcttggtctaggaaatattcctcgtgaaacacctttgaaaacagtaccagcagaaagtaacccaactggttatgcaacaaaattgcaggaagtttctcttggtaaggatacgatgactggtcactgggaaatcatgggtctcaatattactgaaccttttgataccttctggaacggattcccagaagaaattctcactaaaattgaggaattctcaggtcgtaaagtcattcgtgaagctaataaaccatactcaggtacagctgttattgaagactttggacctcgtcaaatggaaactggtgaattgattatttacacttcagctgacccagttcttcaaattgccgcacacgaagacgttatccctttggatgaattgtatcgtatttgtgaatatgcgcgttcaattactcttgagcgtccagctcttctagggcgtatcattgcgcgtccttacgttggtgagcctggaaacttcactcgtacatctaaccgtcgtgatttggctgtctcaccatttgaaccaactgttttggataaattgaatgaagctggtatcgatacttatgccgttggtaaaatcaatgatattttcaacggagctggtatcaaccatgatatgggacacaacaaatcaaatagtcacggtattgataatttgattaaagctatgacttctgaagacttcaaacatggtttttcattcacaaacttggtagacttcgatgccctttatggacaccgtcgtgacccacatggatatcgtgattgcttgcacgaatttgaccaacgtttgcctgaaatcattgctgctatgcgtgaagatgatctcttgatgattactgcagaccacggaaatgatccaacttatgcaggtacagaccatactcgtgaatatattcctttcttggcttatagcccatcattcaaaggaaatggacttattccagtaggtcatttctctgacatctcagcaactgtcgctgaaaactttggtgtagataaagccatgattggtgaaagcttcttggataaacttgtctaaaatgaagcgctatgcatttttggttcgtgggataaacgttggtggtcgtcacaaggtagtcatggaggaattttgtcgtgagttagaagaactcggtatgtcacatgtttcttcctatatcaatagtggaaatcttttctttgattctaccttgatgaaagaggaactcctcttagttttggagagatttttaaataaggcttatccatttattaaggtgttttctctttttactcttgaagattatcaaaatgaagtggcctcgttacctaagtggtgggaagatgatttctatagaaaagacgtcctcttattcactgaaagacttgataagaacgaaatgaagaagattattaactctttagagttgaaagatgaaatacttcattttggtcaacttggtgtctactgggtaaagtatgataaatcaacttatagccaaacagcttatcataagaagttattgaaaacacctttttatcctgatataaccattcgaaatgcaagaactttttcaaaaattggtcactttttaagaatgaaataaaattaagggagaaataacatgtcgctacttgaaaaaattagagttactcaagcatttttggaaagcaaaggaattgaaaaacctgagtttggtttaatcttgggttctggacttggtgagttggctgaagaagttgaagacgcagttgtcattgactatgcggatattccaaactggggacaatcaacggttgtcggacatgctggaaaacttgtttacggaactttgtctggacgtaaggttttggctcttcaagggcgtttccatttttatgaaggaaatccgcttgaagtcgttactttccctgtacgtgttatgaaagctcttggatgtgaaggagttgttgtaaccaatgcagcaggtggtatcggctttggcccaggtactttgatggccatcactgaccacattaacatgaccggtcaaaacccattgatcggtgaaaacttggatgattttggtccacgtttccctgatatgtctaaagcttacacacctgaatatcgtgataccgcccacaaagtggctgataaacttggtatcaaattggatgatggtgtttatatcggtgtgactggtccaacttatgaaactccagctgaaatccgtgcttacaagacacttggggcagatgctgttgggatgtcaactgttcctgaggttattgttgcagctcactctggcttaaaagttcttggtatctcatgtattaccaactttgcggctggtttccaagaagaattgaaccacgaagaagtggtggaagtgacagagcgtgttaaaggggactttaaaggattgctaaaagcgattcttgctgaactctaaattatgatagctcggggaataaaacctataacgtcattacccaagtcgactaggttaagtttagctgtttttggaaccggtattgcttcaggtttggtaggcattctttgtcattaccttttggagtttatacaaattcttgtatttgataatgataaatcgaatttattgtcacagtttaactctgtaagtccctttcgacgatttgcagtattgcttgtagtaggtgttttggctagtttattttggtatttccttcagagacgagtgtccctcctttctattagtaaggctaagcaactcgttggtaagaagagtccaaattttcttggccagagtctacacgctttgatgcaggttacaatcgttggagctggttcctcaattggtaaagaaggagcgcctcgagaattaggcgctctatttggtggtaatctctccaaagccttgcacttggatattgttgatagacaattgctaattgcttgcggggctggcgctggcttagctgcggtttaccaagtcccctttgccagtacactgtttgttctggaaaccttaggtgttgcttggaaatcaaaaaatattattatcattcttgtgacaacctacttgtcagcttattgtgctcggccaatcgttggtaaggaggcaatgtatcaagtcggtaaagttagctcagaccctgctagtctgattcaggttattgttcttgtattagtgataactccgctggcgatgatgtttagcttcttagccaaaaaggctagcaaaagtcgtattactgataaacgtattctgtgtaccatgccactatcttatgtagtattaggtgggattgcagctttctatcctttaatcatgggaaatggtcaggttctagcacaatggttattttcaggtggggtttcagcatacctacctcttatccttgtcgtcaaaggtcttatggtatgtttacttttatgggcaggctcttatgggggaaccttaaccccttcctttaccttaggtgccggatcgggtttcctattgacaagctgtcttgagatttttggcttatcactcaatcctactctaggaatgttacttggtgcaaccgtatttttaggaacaactttagatgctcctctaactgggatagccttagttctaggttttactggtcaaggagggctggtagcagtaccactaatcttagcgagtctactatcgaggataattaaaaatagatggaagaaaaaacaatgaatattcattttatcttacacgaaacgttcgaagttccaggagcctatttaaaatgggctcaagaccgtgggcataatatcacatcaaccaaggtatatgaggaagaggttcttcctgaaaccgttgaaggtattgattttctaattgtgatgggtggccctcagtcacctgatgaggatcgtcaggcatttccttattatgacccagaggctgagattgcatttatgcaaaaagcaattgctgctgatatctatattgttggggtttgcctaggtgctcaacttttatctgtagcctatggtggtgagtatgaacatagtccagaacgtgagattggggttttccctgtaacattaactgaggcaggtttagcggatgagcatatcaaaggttttggcaaaaccctaaatactggtcactggcatggtgatatgcctggattgactgataatgcagttgttcttgctactagtcaaggttgtccacgccaaattgttcgcttcagtcctaaacactatgcctttcaggcacacttggagtttgatcccgaagccattgatttacttatagctgctgacggtgaagagcatttacgtaagcaaaataaagagttgctttttgttcaaacacctgaacaattgcgtgctaacgattattctgaaatgaacaaaaagttatacgattttcttgattcattgactcaagcttaatccacttttaaagttgttatttatccactatataactatataaatatttaaaaataaaaattaagaaaggtagagcgtgtgttctgatttgaacacgagcggaaagctcggaaaatagatagtcttcatttgttttctgtctgctcctttaccatcaaaaaatgaaaggaagggtagttcgggtttgaaactgaacccgggctagaggctgtgtaaaaaagataaatcctcctagatgcgaagcatctttgtcggatttcctatttttactttgcctctttaacgcccttggtatcttatattatgtctattcatattgctgctaagcaaggagaaattgctgataaaattcttcttccaggggatccattgcgtgcgaaattcattgctgagaatttccttgaggatgctgtatgtttcaatgaagttcgtaacatgtttggttacacaggaacatacaaaggtgaacgtgtctcagtaatgggaacaggaatggggatgccatcgatctctatttatgcgcgtgagcttatcgttgactatggtgttaaaaaattgattcgtgtgggtactgctggttcattgaacgaggatgttcacgttcgtgagttagttctagcacaggccgcagcgacaaactctaacattatccgtaatgattggccacaatacgatttcccacaaattgcaagtttcgatctcttggataaggcttaccacattgccaaagaccttggtatgacaacacatgttggtaatgtcttgtcttcggatgtcttctattcaaattatttcgaaaaaaacattgagcttggtaagtggggagtgaaggctgttgaaatggaagcagcagcactttactaccttgcagctcaacaccaagtagatgctcttgccatcatgactatttctgatagtttggtcaatccagatgaagacactacagctgaggaacgtcaaaacactttcactgacatgatgaaagttggtcttgaaacactaattgcagactaatctgtaaaaggacgccattaggtcgtccttttgtgttgtaactaagatctactcgaagaatcaatagattaaaaattttcaaactactagaaaaaaataaaaatatttggaagaaaaagacttgtaataaataggtagatatccgacaatttaaggttcaaccactaaaaatgtgaaaataagtttacaatattataaaaaatgatagaaattaaatgctagatatcataatgaaaaacggtttcttcttttttaaaaagaatgacaattgaaatgaagttatagtaatgttataataataatgggaaatgtctaattttaatttataggagcaatttatatgagttcgcgtacgaatcgtaagcaaaaacgtacgagtaatagatcgtgggggatggtcaacattgggttgaccattctgtatgctattttagcattggtcttattattcaccatgttcaattataatttcctatcctttaggtttttgaacatcattatcactattggtttgttggtagttcttgctattagcatcttccttcagaagactaagaaatcaccactagtgacaacggttgtattggttatcttctcgctagtttctctggttggtatttttggttttaaacaaatgattgacatcactaaccgtatgaatcagacggcagcattttctgaagtagaaatgagcatcgtggttcctaaggaaagtgacatcaaagatgtgagccagcttactagcgtacaggcacctactaaggttgataagaacaatatcgagaccttgatgtcagctctcaaaaaagataaaaaagttgatgttaaagttgaagatgttgcctcatatcaagaagcttatgataatcttaagtctggcaaatctaaagctatggtcttgagtggctcttatgctagcctattagagtctgtcgatagtaattatgcttcaaatctaaaaacaatttatacttataaaattaaaaagaagaatagcaactctgcaaaacaagtagattcaaaagtcttcaatatttatattagtggtattgatacctacggttcgatttcaacagtgtcacgttcagatgtcaatatcattatgacagtaaacatgaatacacataagattctcttgacgactactccacgtgatgcatacgttaagattcctggtggtggggcagaccagtatgataaattaacccacgcaggtatttatggtgttgaaacatctgaacaaactctggaaaatctttatggtattaagattgattactatgcacgaattaacttcacatctttccttaagttgattgaccaacttggtggtgtgacagtccataatgatcaagctttcacaagtcttcatgggaagtttgatttcccagttggtgatatccaaatgaattcagagcaagcacttggatttgttcgtgaacgctatagtctcgatggcggagataatgaccgtggtaaaaaccaggagaaagttatttctgcgattgtaaacaagttggcttctctaaaatctgtatcaaactttacttcaatcgttaataatctccaagactctgttcagacaaatatgtctttggataccattaatgctttggctaatacacaacttgattcaggctctaaatttacagtaacgtctcaagcagtaactggtactggttctactggtcaattgacctcttatgctatgccaaattctagtctttatatgatgaaactagatgattcgagtgtggcaagtgcctctcaagctatcaaaaatctgatggaggaaaaataagtgattgacgttcactcacatattgtttttgatgttgatgatggtcctaaaactttagaagaaagtcttgacctcattggcgaaagctatgcgcaaggagtgcgtacgattgtttcaacatcccatcgtcgtaagggaatgtttgaaaccccagaggataaaatctttgcaaacttttctaaggtaaaagaagaagcagaagcactttatccagacttaactatttgttatggtggtgaactttattacacctcagacattgtggagaagcttgaaaagaatctcattccacgcatgcacaacactcaatttgctttgattgagtttagtgctcgcacatcttggaaagaaattcatagtgggcttagtaatgttttacgcgcaggggtgacaccaattgttgctcatattgagcgctatgatgccctcgaagaaaatgctgatcgtgttcgagaaatcatcaatatgggctgctatactcaagtcaatagctcacatgtcctcaaaccaaagctctttggcgataaagataaagtaagaaagaaacgtgttcgttatttcttggaaaaaaatttggttcatatggttgctagtgacatgcataatcttggtccaagaccaccatttatgaaagatgcctacgctattattgaaaagacttacggaacgcgacgtgctcgtaaccttttcattgaaaatccacaaacactacttgaaaatcaatacatataggagaaactatgactcaggaaaacacgaagcgtgttgaaatcgacgtgcttgcattattgcacaaactttggactaaaaaggtatttattctatttacagccttctatgtcgctgtctttgccttcttgggaacttatttcctcattcaaccaacatatacgtcgtctacacgtatctatgtggttaatcaagctaacgatggcaaaaacctttctgctcaagatttgcaggccggtacatttttgacaaaagactacaaagaaattattacatcgaacgatgtcttgtcagaagttatcaaagatgaaaaattgaatatgacagaagcagaacttgctaaaatgatttcagttaatattcctactgatactcgtcttatctcaatttctgttaatgctaaaactggtcaagatgcgcaaacacttgccaataaggttcgtgaagttgcttcagaaaaaatcaagaacgtgacaaaagttgaagatgttaccacacttgaagaagctaaattgccagagtcaccatcttcaccaaatatcaaacgtaacgtgcttcttggagcagtgcttggaggattccttgcagttgttggtgtattggtacgtgaaatcctagatgatcgtattcgccgaccagaagatgtggaagatgcccttggaatgacacttcttggaattgtccctgatacagataaaatataaggagaagaaatgcctctattaaagttagtaaaatctaaagtaaactttgccaaacaaacagaagagtattacaatgccattcgcacaaatattcaattttctggtacacagatgaaagtgattgcggttagctctgttgaagctggcgaagggaaatcaacgacatctgttaacttggcgatttcatttgctagtgttgggcttcgaacacttctcattgatgctgatactcgtaattctgttttgtcaggtacatttaaatcaaatgagccttataaaggtctttcaaatttcctttcaggaaatgccgatctgaatgaaacgatttgccaaactgatatttctggtttggatgtcattgcatctggtcctgtaccacctaatccaacgagtcttttgcaaaatgacaattttagacatttgatggaagttgctcgtagccgttatgattatgtcattatcgatacgccaccaattggtttggtcattgatgcggttattattgcccatcaggctgatgccagccttttggttacagctgctggaaaaatcaaacgtcgtttcgtaactaaggccgttgaacaattggaacaaagtggttctcaattcttaggtgtcgttcttaataaagtcgacatgacagttgataaatatggctcttatggttcttacggatcatatggcgagtacgggaaaaaatcagaccaaaaagaaggtcattcaagagcacatcgtcgtagaaaaggatagcattaatggggatgatgcggctccttataccttaacagattaaaaaggggtttagagtgaaagaaaaacaagaaattcgtcgcattgaaattggtattatacagttggttgtggttgttttcgcagccatggtagctagtaaaataccttatacagagattacccaaggaagtattgtccttttaggtgtcgtacatgtagtgtcttactatatcagtagttattatgaaaatcttaagtatagaggctacttggatgaactcattgcaactgtcaaatattgtttcgtatttgctctaattgcaactttcctctcgttttttgcagatggaagtttttctatctcacgtcgcggacttctttatgttaccctgatttcaggtgttctcttatacgttacaaatactgttcttaagtatttccgctcttctatctatacacgtcgtaaaagtaacaagaatattctcttgatttctgatcaggcgcgtcttgaaaatgttttgtctcgtatgaaagacaatatggatggtaggattacagcagtttgtgtcttggataatccttatttcactgatccatttatcaagagtgttaaacctgaaaatttaattgaatatgcgacacactcagtagtagaccaagttttgattaatctcccaagtgagcagtataagatttgggattatgcatcaccttttgagctcatggggattccagtttctattaatttgaatgcccttgaatttatgagtcaaggtgaaaaacgtattcaacaattgggtcctttcaaggttgttaccttttcaacgcatttttatagctatggagatatcttagctaaacgcttcctcgatatctgtggagccctagttggtttggtactctgtgggattgttggaatcttcctttatccacttattcgtaaagatggtggaccagccatttttgctcaagaccgtgtgggtgagaatggacgtatcttcaagttttataaattccgttctatgagagtagatgctgaagaaattaagaagaacttgatggcacagaatcaaatgtctggtggtatgtttaagatggacaatgatccacgtattaccaaaatcggacatttcattcgtaaaacgagtcttgatgaacttccacaattttggaatgttctaaaaggtgatatgagcttggttggaactcgtccaccaacattggatgagtacgaatcttatacacctgaacaaaaacgtcgcctcagctttaaaccaggtattactggtctttggcaagtaagcggtcgaagtgaaattacggattttgatgaagttgtaaaactagacgttgcttatatggacggatggacaatctggcgagatatcaaaatcttattgaagacaattaaagtagtagtaatgaaagatggagcaaagtgatggctttctccatttcttttaatggtgattaaatgacaaaaacagtttatatcgttggttctaagggaattccagcaaaatatggtggatttgagacctttgttgagaagttaacagagttccaacaagacaaagatatccaatattatgtagcttgtatgcgtgaaaactctgctaaatcaggtattacagcagacactttcgaacataacggtgcgaaatgctacaatatcgacgtcccaaatatcggacctgcacgtgccatcgcttatgacatcgcagctctcaataaggccattgaaattgctaaggaaaataatgaccaagcaccaatcttttatgttttggcctgccgaattggtccattcatctcaggtattaaaaagaaaatcaaggctatcggtggtacccttatggttaacccggacggtcatgaatggcttcgtgcgaaatggagtcttccagttcgtaaatattggaaaatttctgagcaactcatggtaaaacatgcagatcttttgatttgtgatagtaaaaacattgaatcttatattcaaaaggattatgcgaagtatcgtcctcaaacaacttatattgcctatgggacagatacaactaaatctcgattgactaaggttgatgataaggttcgcacatggtattttgaaaagggtgtcattgaaaataattattaccttgttgtaggacgttttgtgcctgaaaataactatgaggctatgattcgtggctttatggcatctaactctgacaaggactttgttctcattaccaatgttgaagaaaacaaattctacgacaagttgcgtcaggaaactggttttgacaaggatcctcgtgtgaaatttgtcggaactgtttacgaccaagaattgctcaaatacattcgtgaaaatgcctttgcttacttccatggtcatgaagtaggtggtactaatccatcccttcttgaggctcttgagtctactaagctcaacctcttgttggatgtaggctttaaccgtgaagtcggtgaagatggtgctctctattggaagaaagaccaactggcaactgtcattgatcaagctgagcaattggatgaacaagctatcgaagaactcaatcaaaaatcaagtaaacgtatcgctgaagcctttacttgggaaaaaattgttacagactacgagaaaatatttaaaggatagaaatgcagaaaattttatatcttcacgctggtgccgaaatgtatggtgctgacaaggttttgttggagcttattaaggggttggataaagatgcctttgaagctcatgtcatcttgcccaacgatggtgtcttagtgagtgcattggaaaaggttggtgctaaggtaaaagttatcgattatccaatcttacgtcgtaaatattttaatcctaagggaattcttgagtactttggctcttataatcgttattcaaagcaaattgctaaatatgctagggataatggcattacttttattcacaataatacgactgcggtacttgaggggatttatctcaagcgcaagttgaaattacctttgatttggcatgtgcatgaaattattgttaaaccaaaagcaatctctgatttcatcaattttttgatgggccgttatgcggatacgattgtgacagtttcaaatgctgtagccaaccacgtcaagcagtctcgctttgtaaaaaatgaccaagttcaagtcatctataatggtgttgacaatgccgtctatcatgaaatggatgctagtacagtccgtgatcagtttggtatcgcacaggatgctttggttatcggaatggttggtcgagtgaatgcatggaaaggtcaaagcgacttcttagaagctgtgactccaatcttaaaggctaatccaaaagcagtagcctttctggcagggagtgcttttgaaggtgaagaatggcgcgtggatgagttggaaaaggctatatcagactcaccagtagctggacaaatcaaacgcatcgattattatagcaagacgacagagctctataatatgttcgatatctttgtcttaccaagtactaacccagatcctctaccaaccgtagttctcgaatcaatggcttgtggcaaacctgtagtcggttaccgtcatggtggtgtctgtgaaatggttaaagaaggcgaaaacggccttcttgccacaccaaatcagcctgcagaattgtctaaagctattcaagaattggctgataacaccgagaagagagagcaatttggcaaggcatctgtcaaacgccaaaaagaactcttttcattacaaagttatattcgtaatttctcggagttatataagaagtaaaaataaagaggaagtgatatgaattttccgatagattttgttgtaacctgggttgatgggagcgatcctaattggagagctaaaaagagtaaatatgactctacttttacaacatcagaaaataatatgaactccgataaagcgtaccgtgaatgggggacgtttaagtattggtttagaggtgttgagaagtttgcaccttgggtaaataaagtttatttagtaactgataatcaactacctgattggttagatgtggataatagtaaactagaagttattgatcataaagaaatcattaacaatgactatttacctgtgttttcatctaatgccattgaatgtaatattcataaaataccaaatttgtcagaacattttgtttgttttaacgacgatatgtatttaacggcaccagtttcaccaagtgattttttctctgaggaagggctacctaagtataatactgctttatctcctattattcctgaacgatttggaacaggaaactttcaaattaataatatggagataataacaagttatttcagcaaagaacaaatcttgaaaaatgggaagttcttttctctgaaacagggcttaaagcaaatcataaaatctttactttataaaaatagtaaatttatttgtggcttctgggaaagtcatcttccatatcctcttttaaaatcaacatttgatcttttatgggagaaagaaaaggaaatcttagaaaaaacatcagctaaccgttttaggaatccagcagatacaaatatttggctttttaaatattggcaaattgctagtggacaatatgctattggtgattcaaaaattggtggactattttctttggatgatgcaaattcagatttctggaagcttttagtttcgaagaaatataaaattatgtgtattaatgatggctttaacattcaggatgaagataaagtaatgaaagaattcattgcttcatttgatgagtttctacctgaaaagagtacttttgaattataaaacacaggtaattaggagattatggaaagaaaatcattaaaagatagaataaaacctatcgtttatccaattataaattttattcctagacgaagacttaagaataaaaatttcactatcatttgtgataattgttgggctgggaaagtttatcaggagttgggcttgccttatcaaacaccatttgtggggatgtttgtcttttcacctgattacatcaaaatgcttaagaatatcaaacactatttgagtgggaacatccccttgaaatttgttaaggaatcgaaatatatcaaagactttgataattcctatccacttgcacttcttgatgatattgaacttcattttttgcattatgcagatgaagaagaagctactcaaaaatggaatcgccgtttgaagagaatgcattgggataatttgtatttcaagttcaatgataatgatgcctgcacttatgagttgatgaaagagtttgaagagcttccatacaagagtaaggttattttctcttcaaagaattatagtgacctaccttcattggtccactttaaatcagctgaaaagcaaggacatgtaggaattgatttgaaaacttaccaccgttattttaatgctgttacttggttgaataagggtggagaagacttaacataactaattgggtaaataatctatgaaaccacttttaactgtcgtcattccagtttataatgtcgaaaaatatttaaaacgttgtattgatagtattcttgttcaagagtggaagcactatgacatcttacttgtagatgacggaagtactgataattctcctcaaatttgtgatgactatgctaaagcatatgactttatctcagtttttcataaggagaatggtgggctctctgcagctcgtaacacgggtatttctcatgctgagggagaatatgtttattttccagattcagatgattggattgaaccgaatacctttagtgatttagctgaggttattgaatcagatcagtatgatattatttccttcaatcgtgaatttgtaaagagtgaagatgatattataaaatccgattctaaacagtctaagcgattaactggaaaagaagctcttgtagaaatgttttcttatggctttattactggttttgccaatgataagatatatcgcaaagcattgttcactaagaacaatatccagtttccagttggaaagtactatgaagaccttggtaccaattacaaactctttcttgctgctaagaagatttatgcgacaaatcaaaagtattatcactatttaattgataatccagatgcgattaccaaatcatggaatgagcaaaaatttgaaaatatgattggcttctataaagaaatctattattcggatgctgttcgttcgaaacttaattcttgtgaattagaaattgctaagatgttttttgttgatggtatgacgcatagtttagctagtctatataaatcaaatttgtataagttgtatcctgaaataacaaaagatgtaaagaacgagttaaagacaaataaactcacgtttaaggtgttgtctaaactaaatcatagaacaaaatattttttgtatcgattgggtctattaaaaggtgcatttcatctacaacatatattgaaaaagtaggagtctaatttgaaatactctgttattattccagtttataatgttgagaaatacattgatcgttgtttgaaaagtattatttctcaaaattatgatgacttggaaattatagtgatagacaatggatctactgatagtagtggcagtatttgcgatacttatgctagtgaatactcaaatatctcggtctatcatattgaaaaccatggtgttggtgcggcacgtaattttggcttgtccaaagccaggggagagtttatctacttcgttgatagtgatgattatcttgttggtaatctctttgctgattttgctgataagctagtgtcagatttggatttggttgtttttagttattacaattcttttgaggaagatttaactgagaagagccgtactgaaaagtcacttccatttaaaggaaattacgacaaggatggttttatcaagatatttaaagaactattcttatcggatatgctgtacacagtttggaataagatatatcgcagagaattccttcttgaaaataacctttcttttgagcagtatgagttaggtgaagatgtccgctttaatcttgatgtttatcgtaaagtcaacaagatttatctttctcaagattcctactacgtttatgtcattggtagaaaaggttccgccatgtcgggctataaccctaaacgtcttcaatatcaacttcaagaattgaagatggttgataatctactttctgactggaatttggatagttttgattttgataatactgtaaaagcaagaatactgatgagtaacatctacaatataacgaaacagaatttatctttaaatagaaaaattaagctcgttaaagatacatgtgagagacaagatatggaggattttataaagaatgattcttctgcattaaatccactcataaaactgttgctgaaatgtcgaatgtatgttgttttgatttatctaaaaaaaatacagatggtattacaacatttataagaataattgaaaggtatggaaagtacttgtgaatagcagtcgctttatctcagagaaaatctatttatttactctttttatttgggtattatttgcatctctggtaactacaacttattttgtaagggtggatggttttttgtcactctatcgtatcttgctatattttacaataggtatgattacgataaaggaactcattaatcttcctgatacgataaattatttcagataccacttgaaggaattaataattttcctattgtttaccttgaccatgttaatcgtgtcaaaaaatcgagatggtcttcctgatattaatgttttgctgttggttttttcagctagggatatagagttcaagaagttattagggaccttttcttttgctacctttttagtgctatttgtaactattttagctagtaagatgggctatatttctaacatgttgatgagtgctgacaatggttatcgttatagtttgggatttaactatgtttcctttgcttctcaacgtatgttttttgccctatgtagctatcttatgtttagaggaaagaaggttacttatatagagttgttagctctactgtttgctacgttttatatgtaccaacagacctcaacctcaagtccactttatctgagtcttttgattttgacttatgctttatttagtcttaaggtctttaaatttgattttatagacagtaatgttattacggcaaatattgctaaatatggttttattattgcattgctcattactctctatttctgtttctattcaactggtgatttattccatctagttgatcaatttacgcataaccgtctaagactaagtgttcaagggttccgaaattttggagtttccttattaggtcgaccaatctcatttacgaccatggatatctttggtaattattcaagcaattataactttattgatagttcatttgtgcagttactcgtaattgatggattggctgttagtgcattcatgttatttgcattaacacgtgtcatgaattattttgtaactaatcgaaaagatattgttcttgcctgcttgggggttatgattattcatggcatgtttgatccccaaatgctcgttcttcgttactcacctcttatcctattgattagtcgactctttgtgatgaagactgataaagattttttgtaattgaagcagaggtatatcatctagaaagtctaaacagagtcatatacttatgaaagttttaaaaaattacgcctataatctttcctatcaattactggtcattgttttaccaattataacgacaccttatgttactaggattttcagttcaaaggatttaggtacttatggttactttaattcgattgtgacctactttattcttttggcgactttgggagttgctaactatggtactaaggagatttcagggcatcggaaggatattcgtaaaaatttctggggtatttatactctccaattgattgcgactatattgtctctagtcttgtatacatcattatgtttgttctttcctggtatgcaaaatatggtggcttatatcttaggtctaagtttgatatcgaaaggaatggacatttcttggttattccaaggtttggaggattttcgtcgtattaccgcaaggaatacaacggtgaaggttttaggagttgtttccatcttcctatttgtgaaaacacctggtgatttgtatctctatgttttcctattgaccttctttgaattgcttgggcaattgagtatgtggctaccagcgagaccatatattggtgagcctcaatttgatttatcctatgctaagaaacacctcaaacctgttatcttgctgtttcttcctcaggttgccatttcactgtacgtgacattggatcgtactatgttgggtgccttgtcatctaccaatgatgtcggtatttatgaccaggccttgaagattatcaatatccttttaacattagtaacgtctttgggaagtgtgatgcttccaagggtatctggtctcttgtctagtggtgaccataaggccgttaacaagatgcatgagttgtctttcttgatttataatctagtgattttcccaattatagcaggtctcttgattgttaataaggactttgtgagtttcttcctaggaaaagatttccaagaggcttatcttgctattgctataatggtctttaggatgttctttatcggttggacaaatattatgggaatccagattttgattccacacaataaacatcgtgagtttatgctctctacgactattccagctgttgtcagtgtgggacttaatctcttgttaattcctccatttggctttgtcggagcctccattgtatcagttttaacagaggctttggtatggattattcaattgaacttttcaaggagattcatcaaggatgtttcaatccttccagccatgtcaaaaattatcttagcatcagttgtcatgtatcttgggctctttgtctttaagatgtttgtccattttaaacctatgcttaatgtagcagtagatggtcttgtcggtgctatcatttatatcgtcttgattattgtcttacgtgtcgttgatatgaaagacttgaaacaacagttaatgaaaaactaaggagaaaaatatgtacgattatcttatcgttggtgctggtttgtctggagcaatcttcgcacacgaagctactaaacgcggtaaaaaagtaaaagtgattgacaagcgtgatcacatcggtggtaatatctactgtgaagatgttgaaggtattaacgttcacaagtatggtgcccacattttccatacctcaaacaaaaaggtttgggactatgttaaccagtttgctgaatttaacaactatatcaactcaccaattgctaactacaagggcagtctttacaatcttccattcaacatgaacactttctatgctatgtggggcactaagactcctcaagaagttaaggacaagattgctgagcaaacggctgatatgaaagatgttgagcctaaaaaccttgaagaacaagctatcaagttgattggcccagatatctacgaaaagttgattaagggatacactgaaaaacaatggggacgttctgccacagaccttccaccatttatcatcaaacgtcttcctgttcgtttgacttttgataataactactttaatgaccgttaccaaggaattccaatcggtggttacaacgtcatcattgaaaacatgcttggtgatgtagaagtagaacttggtgttgacttctttgccaatcgtgaagagcttgaagcctcagcttataaagttgtatttacagggatgattgaccagtactttgattacaagcatggtgagttggagtatcgcagtcttcgttttgaacacgaagtcttggatgaggaaaaccatcaagggaacgccgtggtcaactacacagagcgtgagattccttatactcgtatcattgagcataagcacttcgagtatggtacgcaacctaagacagttatcacacgtgaatacccagctgactggaaacgtggggatgaaccatactacccaatcaatgatgaaaagaacaacgccatgtttgctaagtaccaagaagaagctaagaaaaatgacaaggttatcttctgtggacgtttggcagactataaatactacgacatgcacgtggtcattgagcgtgctctagaagtcgtagcaaatgagtttgattaagagaaacgataatctatgaaatactacttaaaagaagaatttcttcatgacaataacgctaaaaatgcaggaaataaggctcgtaatgatgttgaatctattgtaaaaagtcaaggatttgaagctcttatcctatcagtagataattggtatgagatgagtactgcaaaagctcaaatacataaggcgaaagccttcagtcattcattaaaccagttgaatgaaggtgatgagctcttgattcaatttccaatgctccaccatagtttcttcaccacatctcttgtgaaaaaagcaagaaaaagaggtgtgaagatctatttcatcatccatgacttagatgctcttcgtttcatgaatggtcaagctgttcctttgaaacatagaattcgaatgaagattcaagaatcaggtcttcttggtgcagctgatggtatcatcgctcacaatccaattatgaaatctgttttggtggataaagggattgctgaggataagattgttagccttggcattttcgactatttgattccaaatttccaagagaagacaggtctaagtaagaatcagccaattattgtggctggtaatctggcacaagaaaaagctggttatctttactcacttcctgcgaaacctgcttataacctttatggtgttggcttcgacgagagcagagctcttgagaatgaggcttactttggctcattcctacctgatgagcttcctgcagcccttgagggtggttttgggcttgtctgggatggtgatagtgctgagacatgtagtggtgtttttggtgagtaccttcgctataacaactctcataaggcgtcactttacttggcatcaggctttccgcttgttgtttggaaacagtcagccttgtctcactttgtacttgagaatggctgtgggattgcagtagaatcgcttcatgatttgaaggctaccattgataatctttcagatactgattaccaagatttgcttgaaaataccaagcgtgtcggtaaaggtattcgtgatggccactacctacttaccgcattgaacaatttgaaataagataaaaaatcctcatcttagtgaggattttttgcattatttggagatttcaaactggtattgggttcctgaaactttcccatttgagtagattgctttaatatagtcgtcataagtaattgacttggacttacctgcttttacgagttcaggatctcgccatacatttgggtcagtagcattgctatctcgcttggtgagatagaggtactcaatgtaggttctattgtcgacaaaggcaccagcaaccttttccttaccattatcagatcgcgtgtacatacgagtcgttccaccaccatctagtaggaaggcaagacgaatattcgagtagcctatattttttaaaagcttatagatgtcttcgtgattcaagcccttattgagggagttgtggccataggtttggataatacggataataccatcataggtctctacgtaaatggaacgagcatttggttggtcaggatcacctttttcccaggttttatcttcttttttatctttaatgagaataccaaaggcacctgtatcccaaccgttgcttcccatgtgggtaaacattttagctgtgtcgatatttggataggttccggcagtgatattattttgatcatctccatatagaaggcctgttttgcccaattcgatttccttttgagcgaaaggacgatctagtccttcgtaagaccaaaaaccagagttaataagagcaagagcttctcgtcgcttagcttcgtacttaatactttgctctgtgagttcaggattatcatcttcggttcttcctttttgtagaacatattttccgtccttcttgaaggatagaatctgcatgtctacatttttaatagtgcctttttcaagtaggacagactgatctaagagctctttattttttatggtaaagctcagtccgtccttatttgatggcatggagagcttcttaatatctcggttgttgaagtagatggtgaggtagagcagtcccccaacgatggcaccaatcattagaagagaaaatagtattcttaaaatattcttcaatttcatactatcattataaacaatctgggcttacaaaacaatcctaagaccattaaatatccaagaatagtatcagtttttcttagtatggtactggtaagcgttttctaaaagggttataataagagtaagttagtcaaggaggttctttatgaccattaaggtgattgcaacagatatggatggtacatttttagacgataaagggagctatgacaaggagcgttttaatcagattttggatgccatggctgcgcgtgatatgcactttgtcgttgcatcaggtaatagtatgagccgtcttaaacccatgtttgcggagacttttgaccgcctgcattttgtagctgaaaatggtggtcaggtggttagctatggcaagcttctgtgtcaggagttcatggcatcaaatgatgttgaaaacttgctaagctattttaattatgatttgttagataggccgactatatttaatggtgctcaaggctcctatatgttaaaagggactagggttaattttgctgagatgataacagaagaagagcaagccgccatggaagcatccattcaacgtttgaatgggctggaggatttagatgatgatttcatcaagattaccatgttgctgagtcctgaagaggctaatcgtgtgtcacaggcttttaatcgtgattttgatggcaatctagttgctgttcccagtggttttggtgctattgacttcattcaaaaaggcatgcacaaggcttgggggctcaagcaacttcttaaccactgggacttgtctgagtccaatgtcatggccttcggtgatggagacaatgattttgagctcttgcaaatggctggccgctcttatgctatggaaaatgccagtccagctattttacaagtggctgatcagattgctccccaccacaaagaccaaggagtattgactgtcttagaagattatttaggattggtttaaagatagggtggtagagtaatgaagttatatttaatgagacatggtgagacactatttaatacgcaaaagcgtgttcagggctggtgtgactcgcccttgactgaaaatggcatttggcaggcagaacaagccaagcagtactttgcaaagaaaggtatttcttttgatgctgtctactcttctacgcaagagagagctactgatacggccaagattgtggtgcctgactattcggtaacccagctcaagggaattaaagaaatgaactttgggtcttttgaagctcaaccagagcacctcctccccaaacatcgaccgggttcacgatcctttgaagatctcttggtcccatacggtggtgaagacattcgcgaggttggtcagagggtcttaaagactgtgttagagaaagcagaagaacacactaaagatggtgctgagaatctcctatttgtcagtcatggggcggctttatggggattaatcattttcatggacttggcctttcctgaaggagtgggctttggaaattgtaatgtttgtgtttatgattataaccaaggtcaattggagcttcttcaggtgattgatccgatttctggtttagaggtaacattatgaaagaattttatttaatgaggcatggacaaacacggtttaatgttcagcatagacttcagggggtctgcgatgcccctttgacggaagtcgggattgaacaggctaaaaaggctggtcagtatctagccaagcaggagccgatttttgatcatgtctttacgtcaacttctgagagagccagtgatactctagaaattgtgactggacgaacagactatgaaagacttaaaggtcttaagggacaggattttggagcttttgagggccagccagagtatcttactcctaaaaccttacctgatggacaaggctttggtgattactttgttcaatttggtggcgagagtacgacccaggtccgggatcgtatggagttaacgattagagccatcatggagagtgtggccgatggttctaagtccttgctagttagtcatggaccatcaattttgcagttctgtagacgtgttttaaatcccgacccagatattcgtggtcttaaaaattgttgtatcttacactttacttatgatcaagggcaatttgaactggtttcagtatataatcctgtagaagaagagtatatctatggaggcgaaggatgacacgactctatttaatgcgacatggacagacactttttaacacacttaatcggattcaaggttggtgtgattctcccttgactgagaaaggtcgggaacaagctcgtcaggtccgtgcttattttgaaaaacatgatatgacttttgaccagtattattgtacgacaactgaaagagcttctgataccattgaattggcgactgggcgtactgattatcatcgtatcaaggggcttaaagaaatgcattttggtatctttgaggggcagccagagtatcttcatcccaagacatctatagtggggcattttggtgaccactatgcccagtttggtggggaaagtcaagatcagttcgttgcgcgtgtggttgcgagtgcaaaggaaatagtagataagcatcctgaccaatctattttagccgttagtcacgctggagccttgatgacttttctgcatgccgtggaaccagagcgggcctttgagtcgtgtccaggtaattgtgccatcttagtctttgattacgatggatcgagcttccactttgtcaagctgatagatccaatagctgatcaagagttggtggaattttagcggctttctatgatcaaagatagtaagaaaccctttcttagtgtataatggaagggtattttaaattttggagtgcctatgaagtttacaaaaaatcagttcatttggttggctgtcctctttttcagctgtttcttgatctatacatactgggaaaccgttgtttcaatttgtaacactatttacattgccagtcagcccttcctggttggagcagggattgcctttgtggtcaatatcctgatgtctttttatgagaagctactggtcaagtttattccatttggttttatcgctaagattaaacgtcccattgctttgctctcagcattggcaaccattggtttggtctttacttgggtcgtcttcactgttcttcccgatttgattgacagtatcaataccttgattagtcaagaccgttcagctattaataacttgattaattggttgcttaaaaacaagtccttgcaaaaaattattcaagatcttggtggtgtgacacaggttagagagctaatcaatagctacagtgctcagttgcttcaacaaatcatgaatggtttgacaagcttcttgacttcgttaacgagtctaccatcaaccttgattaatctctttattagcatcgtcttttcttgctatgtcttggctgggaaggagaaacttgggaatcaggtcaatcgtttggtagatgtctatttaggacgttatggtaagactttccactatgtggtcgttattctcaataatcgcttccgcaatttcttcgtttatcagtcgattgaggcttgtatcttgggaaccttgtgttatattgggatgcgtatctttgattttccatacgctgcgactatttctatcctgattggcttttcagctatgataccagttgtgggggcctatatcggtgtgacaattggtaccatcttgattatgacacactctgtgaccttagcacttttatttgttgcctatgtggttatcttgcagcagtttgaaggaaatctcatctatccttatgtggttggtggctctaccggacttcctggtatttgggttatcttcgctatcaccataggttctgccttgggtggtatcttgggcatgttggtttctgtgccagtagccgcgaccctttatcagattgttaaagataatgttgttaggcgagaagaagccaaagcagcaaatgctattgaaaataatgattaattaaaacagacttgggtctgtttttttcgtactatagtatcagatgtcaataagatagtataagtgtaaacgttttccaagtgttatactattagtagattaaacaagacgaggagataaaagatgacttatacatttccaaaagaatttctctggggtggtgcaacagctgccaaccaatttgaaggtgcttataacttagatggcaaaggtttgtctgtacaggatgtgacgccaaagggtggtgttccacttgaacctggggctttgaatcctttgattacagaccaaccaacaccagataatctaaagctagaaggtatagatttctatcaccgttataaagaggacatagcactttttgcagagatgggcttcaaggtctttcgtatgtcaattgcatggtctcgtattttcccaaatggtgatgatgctgagccaaatgaagctgggcttgctttctatgataatgtctttgatgaattggctaagtatggcatcgaaccgcttgtaaccttgtctcactatgaaacacccctcaacttggcgcgtgaatacaatggatggactaatcgtaaattgattggtttttatgagaactatgtccgtaccgtcttcacacgttataaagataaggtcaaatattggttgacatttaatgaggtgaactctgttctacatgcaccattcatgtcaggtagcattgcgacacctatggaagaactttctaaacaggatctctatcaggcagtccaccatgagttagtcgcatcagcttcagcaaccaagattggtcatgatattaaccctgattttaagattggttgtatggttctttccatgcctgcctatgggatgacagctaatcctttggatcagttggctgttcacgagtttgaaaatcaaaactatctcttctcagatattcatgcgcgtgggaaatatccaaactatattaaacgctatttcaaagataatggtattaaaatacaattcgctcctggtgatgaagaaattttgaaaaataccgttgattttatttcattctcttattatatgtctgtggcaaccgcacataatccagaagactatacgattggtaaaggaaatattatgggtggtgttgaaaatccctaccttgagaaatctgagtggggttgggctatcgatccaatcggtcttcgtttagttttgaatgacttctatgatcgttatcaattgccattgtttatcgtcgaaaatggtttgggtgccaaggatgtccttgttgatggtcctgatggtccaacagttgaagatgattatcgtattgattaccttcaaaaacacttgattcaagtcggtgaagctcttcaagatggtgtggagctttggggctatacgacttggggaccaattgacttggtctcagcctcaacggctgaactcagtaaacgctatggcttcatctacgttgatcgcaatgatgatggtagtggtagcttggctcgttataagaaaaaatcatttgcttggtataagtcagttatcgaaagtaatggtgcagccctttacaaatagaatatgactaagaatctcaaaaatattcgagattcttttttagtattaaagtacaactttgatatatctggatttctgttgacatgagtaaaaagagagtattttaatacacaataactttgtttgtgttattccacatattttctgaaaaagtggtagaataaaagtgtgaaagcgttcttatattttccgaagaagtagcgagtctatctctttgcttttcctacttagatggaggtaacgataatgaatgatttgaaaaaagttctcttagctggaatcgggttgactgctatgacagttgataaggccgatagctttgtcaaagagttggttgaaaaggggcgtttgactgttgaagaaggtaaggaactggaacaagagctcaaacgtcaaagtaaggaagaagctcaagaatttttagtgaaacttgatgctaagaaatcttcagttgagtatgcgactaaggatgacgtgaaacgtcttgaagaaaaacttgacgctttgatcagtcaaaataaataaaatgtaaggagactaaaatggcaagtaaacgattgagacatgtgttgaaggttttctcgtcagttggtctcctttcttatcgtgaaaaacaccttcctcaagaccaacagacaacacctgtcaagctacgccaagcctttgagcaattaggacctagttttgttaaaattggtcaaatcctatccacgcgctctgaccttttgccagaaaactatatcaaagaattatcaaagctccagagctcagttcctcccttgaataaagaggaagtcatgactgccattaggcgagaattacctaatgagctttctgacagtttccttgatttttcggaagagcccttagcttctggttctgtcgctcagacccatagagctagattattgtttggtcaggaagtgattgtaaaaatccagagacctggtattgatgaggtcgttaaggaagatattcagcttctcattaagcttgcacggcacataccaaagcattttatccccatggtcgatgttcaggaggttttggaaaatctgcgtgaaaccttaattaaggaactagatttcaggaatgaagcagaggccatgaagtgctttaaggccaataacagggctgttgcttgtctaggtgtccccgaggtctatgataccttcacgacacctcacctcatagttgaagagtatatcaatgggattccgcttaatcactacagccaactgattgaggctggctatgacttagaagatgtgggtaagaaacttatgctgtcatttatcaagcaagtcttcaaagatggctattttcatggtgacccccatcctggaaatctgttggtacgtgatggcaagatttatttcattgattttggaattatgggtgagttggaagtggggatgcgtgcgtccttaaatgacatcctgtacagttttaccgcacaagatgttgatggtatgaccaaggccatcttgtccgttacacaatttgataatggtcttaatcgtgcagtcctaagtcaagatgtagagcaaatgttaggtcgttattctggtattgacttgggaagtctctctataacagatttgctgcaggatttgatggctattttccagaaaaatcatcttaaagcctcctctcaaattaccattttggagaaagcttcgcttcaaattgaggggattttccgagagttagcaccaaatatggatcttatgaccctggccaaggattacttcctagaaaatatgggacctgacatgcttaagcaggccctgaataaagagagtatcttgattgaactcttttatctgattcgcaatgggaagaacattccacgtcgtctgcatcagctcttggagcaaattttaaacggacgaattgtggtgaaccatgattttattaacttttcgggtcgaattaaagtttttgagaaagtattaaataatctggttttagccttattgtcattaggatttctactttccggtgcccttttggctaataaatcaggttttgaaaatcttgcctggctatttcttggacttggaacttttctagctttaatcacagtagtgcgtataatatttaagaaaaaaggataaagtatgattgaaacaactaggcctgagcttgtggcctatcaagaagagcgtttagccaaatttgtgaatgagaatcaaaagttagacaaaggccaaatcgtttttgcaggggactccatcacggagttttttgcattgaaaaaatatctgggtcgagagtttccccttgttaaccgtgggattgcaggaacagactcggtttggcttttagaacatcttaaagagcaggtcttagatttggaaccaagtaaattggtgctcttgattggcattaacgacatcggaagaggttaccctattcgagatattgtcactcgtatttccgatattatcatgacagttcgtcaggaatccctctttactgaggtctatttgctgagtgtctttccagttagtgaagaatcacagtatgcttctaaggttaagattcgaaataatacgactgtacgtgagctaaatcaacaattagctgtcctccccggtgtgacctatgttgatctttttgattaccttactgatgacatggggcagttaaatgacaactatacaacggatggtttgcacttgagttcacaaggttatcaagtccttgcggaaccaatcataaaggagattttagaatgaaagttggcttagtcctcgaaggcggagggatgcgtggcttatatacggctggtgtattagatgcctttttagaagctggaattaaggtggatggcgttgtttcagtatcggctggagcactttttggtgttaattacctttctaaccagcctcaaagagctcttcgctacaacaagcgttttatgggagaccgtcgctatatgagtttctggtcatggctgacaacaggtaacttcgttaataaggaattctcctattataaggttcccatggagttggacgtttttgatcaggaggcctttgctgattcaggtgttcccttctatgtggtcactacagatattgagaccggaaaaccagactatatcaagattgaccatgtctttgagcaaatggaagcccttcgtgcaagttccgccctacctctggtttctgaaattgtcgagtacaagggtaaacgctacatggatggtggtctgtctgatagtctccctattgattttatggaaaatttgggctttgataaactcattgtagttctgacacgtcctaaaggctaccgtaaacagccatctaaaacgagtaagcgaatctacaagctcttttatcgtaagtatcctgagtttgtccaagtggcttcgaatcgccacctccactacaataagagtattgaaaagatagaggctttggaaaaaactggcaatctttatgctatccatccagaacacgcacttgaagttagtcgtttggagaaggatcctgaaaagtttgaagccatttatcaagaaggattggatcaaatgcgtaatgatatgtctaatctcaaaacatttcttggagacaactaaaaacgtgctcagttgagcacgttcttttagttattcatttgtcttgcttgacgacgttctttaactttttgacgacgtcctttttcattatggtaaatcaagtagaggagtccaacagggacaagacatagcaaccagaaataaactgggagttggctcttatctgttgttttagtagcctttttatctttctggttacttccaaaatcgaaccatcccttaactttagttgccttaacagaagtagctttgatattaggtgacactgtcttcagaccattatcaatgacaatgtgatcatctttaacagagattttagggtctttaccttttttaacggtggcatagacgtctttttcgacattgtattttttaccgtcgatttcttgttcacccttgctaagaactttcttgtatgagaagtctttgtacatcttctcaacgagagcattaccaaaggtatgacgaatctcttcacctgtttggtcagaccaatcaccagaacccatgatgacagcaatcatacgttgatcaccacgcttgatggtatcaatatagttgaaagcaccttctgggctagatcctgtcttcaacccatcaaccccatcaattccgtatttggcacctggaatagagtagttgtaagtctcgaaggtttcctcgtaaggtgttccttttttaactgtgacaacaggtttgctagtgtacttgagaatttctgggtatttcttgatgaagttataggtcatgatagccaaatcacgcgcagtagtttggttggtttggttgttatcataacgttgaggactgtagtaacctttgaaggcaacagcaacagcaccagaagcgttgaaccatttggtattggtcatccctagctctttagatttttcattcatcatgtcaagccatttatcaggatcattattggtcaagtagttggccagcatcacggttgtaacgttagaggaaggcaccgccgtcatagtgatgagttctgaaaccgtataatcaacacccgcaacaatcttgttgttggaaatttcgtaaatatcggcaatagcttggtcggttggagtagctgtgataacagtatcttcagaaatctctcctttagacatagcttcaaagaccaaataaagtgtcatggccttagacatagaagcagggtcacgcacctcgtcagcattttcttcccagaggacatctccggtattgccatcaattaagagggttgatttgggacgataggcctcagtggcttcagtataaccagcagcgcgtgtgatatccatcaattcatctgcactagacaaactcggtgctagggctagacaagctgctaaaaggacggcaacaattttctttttcacaatgtgtctcctttaatatctatggggttctgtagctggcagaacctatttctatctattaataacatttgcctgtcaaaaccctaaattcagtagtgacaaacaccttaattataacatataaaagttagagttttcccaacattcggcattttaatgtaatttttagaattgattgaatgttacacaaatatagttggaagtagaaaaaaacgagcttgctcgctcgttacttttcatcttttatccttgtcacttggtggtaaatcatgaaccaggtttcatttcgacgccagatactagtgtggaaatttcctcccaactcataactaattaatttcgttttttggctgacagatgtcatcttgaagctgtcaaagttattgagaagtggttgttgattggcgatgacttcttcacgagtgtgatgatgaccattttcatctattaagtagaaatcaggtgccaagagattttcatagtcaggaattttcgacaaaataatcttttcattgcgagagagtttgtgaaggacattgccataaatttcgtcttcaggaatagcagcgggctctacgtggacatcagtgtcataaacagagaaacgcttgctgagaacctcttcaatttgttcagtaatggaatgactctcgtaaacagagaggtcaggattcatttcaaccacaatatcaagatagacgttgctaccataagaacggccacgctgcttcttaaccttagtgacttttggaatctcaagaatcgctttctcataggctttgaggtttctctcatcgaaaccgtctgataaactaaaggttgcttccatgaagatatcataggctgtctttagaatgaaggaggtaatgataatggctgtaatatagtcaataatcgtgaggttgaaggatgctgcaacaatggcgattgacgttccaatagaagttacggcatcggagagattatccttagctgccgcaatcaaagcgctagatttcagctttttggcaagtcctttattgtataagtaaacgccacacatgacgatagcagaaagaactccgacggttgcaccaaggggatcgactacagtttcctctcttagaaaaatctttcgaactgtttgaattaggacttggaagcctaccacgaacatgataaaggaagtgactaggcttgataagtcttcaatcttccaatgaccaaacctatgatctgcatcagcaggttgactagctaggtgcaatccaatgagtagggccacgttccctaaaatatctgacaagttattgaaaccatcggcaatcaaagagctagaattaaaaaagtgtccagctagaagttttgcaatggtaagaagaaggtaggcagcgatgctgacaatgggacctcgtctggctgctcttaaattttcatacgtagtcatagggttaccttttctgttaaaatacaagtctaattatagcataaaactataacgagttaaaggttgtaagccctttaaacttgtggagtaatgtatttttaaaacttgatagaaaatgcttcgtaatcatgctgttttttcagtattttccgaatattccctacaaattatggtataatttagggtgtaaaacagtctaaaaagaggtttttatggaacattcgacatggcacaagcttctgaaagaggaactgcctgaccattatttttcaaagataaatcagtttatggaccaggtttatagccaggggacggtttatccgccgcgtgacaaggtttttaatgctttgttagagactccgtttgaagaagtgcgggtggtaatccttggtcaggacccttatcatgggcctcatcaagcacagggactttccttctcggtacctgatagccttccagcccccccgtctttgaaaaatattctcaaggaattagaggaagatttaggtcctagatcctttcatgatttaacgtcatgggccgagcagggggtgcttttgcttaatgcctgtctaacagttccagcaggtcaagcaaatgggcatgctggtcaggtttgggaaccttttacagatgctgtgattaaggttctcaatcaaaaggatactcctgttgtctttatactttggggtggctatgctcgtaagaagaaggcactagtgactaactctaaacatgccattattgagagtgcccatccgagtcccttgtcggcctatcgtggtttttttggcagcaagccattttcaaaagccgatgcctaccttgtatctcaaggccaatctccaattgattggttgaagtaaaatagaaagttggaagattatgttactgattaaaaatggtcgtgttgtagaccctaagtctggtttggatacgcaagctgatgttcttgttgatggtaaaaaagttgttaagattgctgaaaatatcgaagctggagatgctcaagtcatcgatgcgactggtcttgtggttgctcctggcttggtggatatccatgttcacttccgtgagccaggtcaaactcataaggaagacattcatactggtgccttggcagcggctgcaggtggttttacaacagttgtaatgatggctaacactaatccaacgatttcagataaggaaaccttggaggaggtcttgacttcggcagctaaggaaaatatccatgttaagtctgttgcgactattactaagaattttgatggtgaaaatctcactgatttcaagggtttgcttgaagccggtgctgtcggattctcagatgatggtattccattgaccaatgctggtattgtcaaaaaagccatggagctagctaaggagaataatacctttatcagccttcacgaggaggatcctgatttaaatggtattctcggtttcaatgaaaatattgctaaaaaagaattccatatttgtggggcaacaggtgtagctgagtacagtatgattgcgcgtgatgtcatgatttcttatgatacacaagcccatgttcatattcaacacttgtcaaaagctgaatctgtaaaagtggttgaatttgctcaaaaacttggagcacaagttacagccgaagtggcaccacaacatttctctaagacagaagacctcttgctctcaaaaggtgctaatgccaagatgaacccaccacttcgtttggaatctgaccgtcaggccgtcatcgaagggttgaaatctggagtcatctcagtcattgccacagaccacgcgccacaccatgccgatgaaaagaatgtcgatgatgtgactaaagcaccatcaggaatgactggtcttgaaacatctttatctcttggattgacctacttggttgaagcaggacacttaagcttgacggaactcttgaaagtaatgactagcaacccatctgatctttatggcttcgatgctggttatttggctgaaaatggaccagctgaccttgtgatttttgcagacaaggaaaaacgtcaggtcacagcagactttaagtctaaagcatccaattcaccatttgtaggcgaagaacttacgggcagtgttaaatacactatctgtgacggtgagattgtctatcaagcctagtcataagagaagagaggtaaaacgcttatgtttcaatctcgatatttaaagattgactgatatgtaaggagtgactgatgaaaaaaggactgctttggttaggactagtcttagctatgatactaacgattggagcttgtgacatcgctaaagccagtgatagcgataatgaggtgtcgtatagcattccaagttataagggacacttggctattcacgaggatggcggagcgacctttacccaagaagtgacttatgatttttcaagttcttataatggtcagtacgtgacattaggcagtgtaaaaccacttccaaaaggttttaatattgaagaaaatccaactgtcacagtctctgataaagctgaaaaaataaccacagaaaatggtgtggaaactgtctttacgaaaagacagatacgtgtggaatcagaaaaactcaaaaacggtatcaaactaaaggtctataatcctggggcttatgataaagtggttcttaaggtgacttggcaaatcaaacacatgttagacctctattctgatgtggctgccttaaactggttccctatctcagattgggataactccattgaacatgttgattttacggttactggtttagacgctgctaagggtgatttgtatgcccatacaggctttttcaataaaaagccaacagttactcgtactccagatggatttaagatacatatcgatgatttagccccaaaaggaaagttagaactccatgcttattggccaatgactaagaccttaaaagaggctaatgcctcctatatcaaaaatgaggcgcataagactacttttcttaaaaaagaagctcatatcgtcagaatgggtgtcttctttcgtttcctaagcttccagttaattccaagcttaatcatcatagtaacgcttatgggaattctcttttttatctggcttctcatcagtacaaggcttcctgactttccaaaaaatgcaagactttatgaggcaccaaacaatctagcacctttagttgttgctaaatccatctataaccagtcctttgataagataagcttgaaagaagaaaaaggtcctctttctttcggacatatgattcaagctacgattttagacttgctagatagaggccatatcgtctccaagtcatcgacgttggccgtcatccaaaaagagggtctttcaacattcgaagagacttttatcgatatgatgtttgatggtcgcagtgaaatcacaaaaggcgatatattttcgcggtattatcttgataaaaaagaactaagcacaaaattcaaaaaagctaaaagcactgttgaaagagaaaagattaaggatatcgggctaaaagtcaaagcccagttttcatctgacgtttataagctttcaaaagaagttgaccgtgaggttcgaaatctggggcttgtaaagatctatagagaattcacacctcttgaaaaacgcctatctctgtatagtcatttaagctttgcatttgcattcgtagtttcatttgttagtggtttattctttgctattgcttttggggcctctcttagtgtattttacttttttgctatcataccaatcttcctgttatggctaatagtaacacgcattgttaaaaaacgtcgaaagaggtgtcttgataaggcgaccatagatacttactatcagtggtatagttttagaaatatgataaagagtattccaagcttcaaacaaaccgaaattgacgctatcgtcttatggaaccgtattttggtttatgcgaccctatatggatacgctaagaaagttaccgagaccttgaaaaaatatcatattcacttatcaaacccttctttggaatcgactcttgattcagatacgtcctttaacacttatgttgcaagccaaatgcttcaaggctatatcagcaactcagataccgtaagtagcttttctatcaattcaaatagtggtagtggcggctttggaggcggtggcttctctggtggtggcggaggaggcggtggtggcgccttctaagctacgctagtcggagtttactctcaatagagacactcagtctatatgatcttgggtgtctttttgtttggcgaataattcctttcattctaaactgttaggaatttttagtgagaagagatataaagtaacaaaaaaagagccactggctctttttaaatatgatcttaataaccaggttcaaagatttcaataatttgagtcagataacctgcatgtaaaccgatacgatagtcaacatttggcaaactctttactaaatcattcagttctttatctttgctaaccttatcagccaaaactggtaattcaacaacaaggagttgtgagtgatctagttgaaggtaactactattgaccttgacatcaggacgaagtagtttaaatatcgctctttccgaagcttggagcagttgatataaatcgaggtcagataaaggaatctcaccaaactgaggactgatgtttatagcaatatcaatatgagcagctcgcatttctaaaatgcggttagagaggaaactagatattattggattgctaagcctatctaagttttcttgagtctctggattaccaatgctagcattgtccgttttataaatctcaagtagactagtagctttggcagtatcttcattttccaaggcaagagaaacctccttgagatttttcttgaataagtcgaaggacgtttgcttttgcataataatctggataaaggatttgctatagttagtcatagtacccaacaatttatgacgttctttgttcagtctatcgatagattgttggtggacagcctggttccaattgtaaaaatcccatagtagtagagcaatatagagaactaagataacagaactattaggactgaccttgaaaactatttcaaataaatttttagggtcatttgctgttggaagaatactgttaagaccatggataacagtaaagaagacataataaacagctaggaaggcagtgcttcgcaaccagttacgtctagcccaagcttcgtcaagactactcatctgatttaggtctacggcgaagattttaagcattaggtaaatgattaatggtgctaagatgtaggtcaagatatgtaagttagtgttgagggtaatatcacccttgatatgtaagacatgagggataatgacaattgaaagtagtcgtgttgccatatcaaaaaggatagttggataaaaagcgtaaagcaatcgatgatagaaagaacgctctttgacaagggccaaatcggcaacaaggaagaaaagcgggtccacaacgatttttacgagactaaaataggacgctgcagctacataggacaaaaatagaagtaaaaggtgtcctcgtagtggctttatcttagacatagtctggtagaggtaccaaatagaaatgaaactaatggcctgtaagagaggattgataatattagtaatcattgtaacctcctttagtcatgtcaatttcaatttgtaagcgataaatcccagaacgtgtatttgaaacaatgttaacgtttggataagtagatagaatagtattgacgcgttttagttcaggatcagagaaatcagatgtaatagctgagtcttctttagtgcttgaactttcaacgacaaagtgttgactatcctcatccttaaaataagcatagctaaggtatttctgttcactatcttgtgcttggtcaatgacatgatccaagatagttgataggatatatacccagtctaaaggataaataggatagacggtaataggttctgggacctccatactaacccaaacatccagttcttttgcctttagaaatttagcttcaaagagtacctgtaaatctggcagtttaatattttctagtttgtttcgataaaaatgatcaatcttcttatctagcggattcggtgtcagtaagtagtcaattaactcctgagcttcctcattttgttgaaaacggatgatatcgtagaggttttcagcttcgtctttgatgaagagctcttggctagtctttttctggtaccaggtattgatgttctgacttgatttttgaagaaggtgagaatgttcctcttgggctgcttgtgtttgagcattgaggtcttttctatagagattaacctgcttagatagaattagagccgtaatgataagaaaggcaatggtaaagtgaatgtctgttgaaacaagttcagaagcaaagtaaataaaggctaagctacaaagagcgacagacgttgacctgtaccatggtcttgctttatcaatttgcatcattcgagagtagtccacctgaagaagggcactttgtgcaaaccaaagtaaaaaagcaagaaagagaataaagggaccagcataatagtaatctaggacagaagggaaaaagattggaataatcaggaaaatgaccaatcttaccattaaggcaaaggtgaaaggtatgaagaaagtctccaaaatggtatgtcttagatttttgtaggatttggcagctagaaagagtacaagtgcaataaaaccggattttggatacaaaatgcccaaataactagaggcaaaaattgctataccagctaaaataataatccagtatctaagcggcctttgcgtggtcaccttgaagataataatttgtaaaataaaagctatacatgccgtaagcccgtgaattatgacatcactcaatatcaaatattctcctattcgggtaaaatctatacaatcatgctattataccatatcgcaaacaaaaagagcatacgaattgtctataagtgataaggatgtaaggcttttcattttttcaagcatatttcttgcccattaagtttttttaacctatcctagatgtatagaaaaatttcgatagaggagatcgatatggtaaaactttctaaagagacacatcttgagatgttcactaaaatggaacgtattcgtgaatttgattcacgtattaataaattggttcgtcgtggttttgttcaaggaatgactcacttttcagttggtgaggaagcagccaacgttggggctgttcaacacttgagctatgacgatatcttcttttcaaatcaccgtggtcacggacaatctattgcccaagacatggatttgaataaaatgatggcggagcttgcaggtaaggcgacaggtgtttctaagggccgtggtggttctatgcacttggctgactttgaaaaaggtaactacggaactaacggtattgttggtggtggttatgctcttgcagtaggtgcggctctcactcagcaatacaaagaaacaggaaacattgttgtggccttttcaggagatggtgcaactaacgaaggttcattccatgagtcagtcaatatggcagctacttggaaattacctgttgtcttctttatcatcaataaccgttatggtatctcaatggatatccataaagctacaaatacacctcacctttatacacgtgcggaagcttatggtattcctggtttctactgtgaagatgggaacgatgttttggctgtatatgaaacaatgggcaaggctgtcgagcatgtccgtggtggcaacggtcctgctatcgttgaggtagaatcttaccgctggtttggtcactcaactgccgatgcgggtgtttaccgtactaaggaagaagttgatgagtggaagaacaataacgaccctattattaaataccgtgactatctcgtttctgaaaatatcgcaagcgctgaagagttagatgctatccaaagccaagttaaggcagaggttgatgcagcttatgagttcgcccaaaatagcccagatccagaactttcagttgcctttgaagatgtatgggtagactaaagagaaaggttgaggaatacaagtatgagtgaaacaaaattgatggccttgcgtgaggcagtaaaccttgctatgagcgaggaaatgcgtaaagacgaaaatatcttccttatgggtgaagatgttggtatctatggtggtgacttcggtacatcagttggtatgttggcagagtttggtgaaaaacgtgttagagatacaccaatttcagaggctgctatcgctggtgcagctgttgggtctgctattacaggtcttcgtccaatcgttgacttgactttcatggacttcatcacgattgcccttgacgctatcgttaataatggcgcaaaaaataactacatgtttggtggtggtttgaagactcctgtaaccttccgtgtggcatctggttcagggattggttctgcggcacagcactcacaatctcttgagtcatggttgactcacattccagggattaaagtggttgctccaggtaatgctaacgatgctaaaggtcttttgaaatctgctattcaagataataacattgttattttcatggaaccaaaagcactttacggtaaaaaagaggaagtaacacaagatcctgatttctacattccacttggaaaaggtgaaatcaagcgtgaaggaactgaccttactattgtcacatatggtcgtatgttggaacgtgttcttaaggctgctgaagaagtggctgaacaaggtatcaatgttgaggttgttgacccacgtacgcttatcccacttgataaggaattgattttcgagtcagttaagaagactggtaaactcatgttggtcaatgatgcatataagactggtggattcatcggtgagattgctgctatggttactgaaagtgaagcatttgattaccttgaccacccaattgtacgtttggcaagtgaagatgtgcctgtaccttatgcgcgtgtcttggaacaagcggttcttccagatgttgaaaagattaaggctgctattatcaagatggccaataaaggaaactaactttctagcgacggttaagtgatatgtctcgctagtaaaatgtgtttcttgttttaactgtgagagtatcggaaaatataatttaaagtagaaaggagagggcgttaaagcgtttgagttgatttgaactcaaacgaaatgcttcggaatttagatagttttatttgtgtgcaagcacactaacataaaactcctaaaactctgtcgcattttagcgttcttagtatcataaaatatggcttttgagattattatgccaaagcttggtgtggacatgcaggaaggcgaaatcatcgagtggaagaaacaagagggtgatgtggttaatgagggagatatccttcttgaaatcatgtcagataaaacgaacatggaacttgaagcagaagattctggtgttctattgaagattacccgtcaggctggtgaaactgtaccagttactgaggttattggttatattggagcagagggtgaagttgtggccgataatgctgcgagcgcaccagctacagaagctactccgcaagttgaagaagttgctactgtggaagcacctgtagtggcagcccaagcccaagcccctgtcgtacacgaaggtggcaaagtacgtgcaacacctaaagcacgtaaagtagcgcgtgagttggggattgacctcgctcaagttccaggaactggagcaaaaggtcgtgttcatgctgatgacgttgaaaactttaagggtgctcaacctaaggcgactccattggcacgtaagattgcagcggaccttggtattgacttagctagcgtatctggaacaggctttggtggtaagattactaaggaagacatccttgcaatcagtgccccagcgcaagttaaggaagcggctgctgcacctgtggttgaagctaaacctgaaaaagtcttgccagaaggcgtggaagttatcccaatgtctgctatgcgtaaggcaatttctaagggaatgacgcactcatacttgactgcaccaacctttactcttaactatgacgtggacatgactaaccttatggctcttcgtaagcaagtcctagacccaatcatgaataagactggtatgaaggtaaccttcacggatttgattggcttggcagttgtgcgtacccttatgaaagaggaacaccgttacctcaatgcatccttgattgacgatgcgcaaaatatcgaattacataaatttgttaatctcggtattgcggttggtctcgatgatggcttgattgtaccagttgttcacggtgcagataagatgagtttatctgagtttgttgtggcctctaaggatgtcatcaagaaggctcaggctggtaaattgaaggctgctgaaatgtcaggttcaaccttctctattactaacttgggaatgtttggaaccaaatcatttaacccaatcatcaaccaaccaaactcagctatccttggtgtttcagcaacgattcaaactccagttgttgttgatggggaagttgtcgtgcgtccaatcatgggtctatgcttgacaattgaccaccgtattgtagatggtatgaatggtgccaaattcatggttgatttgaaacatttgattgaaaatcctatggaattgttgatttaagaaaaaaatatctgaaaactgaagttttaatagaaaggagagggcgaaccagagggtataactgaacccgagcggaaagcttggaaaatagaccgtctgtctacgtcagcaggctgacgtgtcagatgcctaattttcagtcgctttctggtcgctcttggtatcttataaatggcttttgagattattatgcctaagcttggtgtggacatgcaggaaggcgaaatcatcgagtggaaaaaacaagagggtgatgtggttaatgagggagatatccttcttgaaatcatgtcagataaaacgaacatggaacttgaagcggaagattctggtgttcttttgaagattacccgtcaggctggtgaaactgtaccagttactgaggttattggttatattggagcagaaggtgaagttgtggctgataaggcagctagcgcacctgttacagaagcaactgctcagttggaatcagctggtcttgaagttcctaaagctcctgcccaagctactccagcagccgctgcagaaaaaacaccgcttgctgacaatgagtatgatattatcgttgtcggtggtggtcctgccggttactattctgccattcgtggtgcgcaacttggtggtaaggttgccatcgttgaaaaatctgaatttggtggaacatgtttgaataaaggatgtatcccaactaagacctaccttaaaaatgcagaaatccttgatggacttaagattgctgcaggtcgtggtatcaacctagcgtcaacaaactacactatcgatatggataagacagttgactttaagaactctgtcgttaagacccttactggtggtgttcaaggtcttttgaaggctaacaaggtcactattttcaacggtcttggtcaagttaacccagataagacagttactattggttcagaaacaatcaagggacgcaatatcatccttgcgactggatcaaaagtatctcgtatcaatattcctggtattgagtcacaacttgtgatgacatcagatgatattcttgacttacgtgaattgcctaaatcacttgctgttatgggtggtggtgtcgttggtatcgagcttggtcttgtttatgcctcatacggtgtagaagtgactgttgttgagatggctgaccgcattattcctgctatggataaagaagtgtcacttgaacttcaaaaaattcttactaagaagggtatgaagatcatgacatctgttggggtttctgagattgtagaagctaacaaccaattgacccttaaacttaataatggtgaagagattgtagcggatcgtgcccttctttcaatcggtcgtgtccctcaattggatggtcttgaaaatcttaaccttgaacttgaccgtggtcgtatcaaagttaatgcttatcaagaaacatcaatcccaggaatttacgcaccaggtgatgttaacggaactaagatgcttgctcacgcggctttccgtatgggtgaagttgcagctgaaaatgctatgcgtggcaatgtccgtaaggctcaccttgactacacaccagcagctgtctacactcacccagaagtcgcaatgtgtggtctcactgaagaagatgcacgcgctaaatacggtgatgttctcattggtaaatcaagctttgctggtaacggacgtgccattgcttcaaatgaagctcaaggttttgttaaagtcgttgcagatgcgaagtaccatgaaatccttggtgttcacattattggtccagccgcagctgaattgattaacgaagcatcaacaattatggaaaatgaattgactgtagatgaactcttgcaatctatccacggtcacccaaccttctctgaaaacatgtatgaagcctttgctgacgtacttggagaagctatccataacccaccaaaacgtaaataatgccaataaaattctcggacggatgtttggggatttttcttttgtcacacattttcatctttaatgatatgtgctaagtttgtcactatttttccaaaactaatccgaatatatagataaagggttttcatattgaacgaatagtaagtttataagtttttagagttttataatctttctattttgtttagaaaactttaagtaatgacctttccattagagtttttctatggtaaaatggttgacgtattaaaaatgcaaaaggaaagttaaatgcgaacgaaagattttatctactatgctagtgcggctgttctcttggctgtgacaactcaggttgctcaggcagatgaagtggcgacacaaactccttctgttactgaaggaaatcagtatcaacctgcgacagcggctgagatttttggtggagaagcagtcttgcctgcaactcctagttcaactgtttcagcacccgtagctacgagtgaggtggcaaaacctagtgctcctgcggtagcttcgtcacttgcagcacaaagttcagaggctgtaacaactgcggcatcaacttcagtagctaactctactgttgctgtagcgtcaacttcagtaacatcttcagttgttagttcagaaagtgcaacagcttctacaagtgcgacaaattctgaaacgtcaaacagcgctgtagcaacacctgctaaattgacgaattctacggatgttccttcgccaacgcttaaggtgcaaccaaagacttttatcgatgtcagcagccataatggtgagatcagtgtagatgactatcgtgcacttgcacgccaaggtgtgggtggtgtcgttgtaaagttgactgaggacacttggtacaacaaccctaaagcaccctcacaagttcgcaatgctcaaattgctggtcttcaagtatcaacctatcatttttctcgatacacaactgaggaagaagcacgtgcagaagctcgtttctacatccaagctgcacaaaaactaaaccttccaaaaagtactgttatggttaatgatttcgaagactctaagatgcttccaaatatcaaccgtaacacccaagcttgggttaacgaaatgcgtaagcatggatacaacaacttgatgttctatacaagtgccagctggttggatgagaacaatctaggctaccgtggacctgtctcaacctctcaatttgggattgagaatttctgggttgcccagtacccatcaacaactcttacagcaacaagtgctaagaacatgcgctataatgccaaaactggtgcatggcagttttcagctacggctaatctcttgccaggtaaacatgtctttgaccatagcgtggactatacaggacgtttcacagctaatgccagtgctgaggttgatgccactcaaggcgatttgagtggaaccatttctattgtcaataacaatccaactcttggtagctttgatgttgtcatctctaatgttaaggcaccaaacggtgttgaaactgtctctgttccaatttggtcagaaattaatggccaagatgacattatctggtatacggctaaccgtcaaaataatggaacttatacagtaaacgttaaggcttcagctcataaaaactcaacaggcctttacaatgttcatctttattatattcaaaaagatggtcaaatgacgggtgttggtggaacaactacgcaggtcttcattggtaagacaccagagcagttgaaacctaaagcaagttttgctattgaaaataataatgctaaggcaggaacttttgatgccgttatcactaatatctcagcaccactaggtgttaaagaggttttagtcccatcatggagtcttgaaaatggtcaagacgaccttatttggcataaggcaaccaagcaaaatgatggtagctatcgtgtcaccattaaggcaagtgagcataagggcaataaagggaattaccgtgctgatgcctacatcgtggacaatgctaacaatcgtcattatattgccgaaaaagtagtgtctgttgattatgctcgaccaagtggtgtccttacaattgaaaacaataatactgcagcaggtacttttgatgccgttgttcgtaatatcgttgctcctacaggtttgaaagaggttcttgttccttcatggagtttagctggtggtcaagatgaccttatctggcataaggcaagtcgtcaagccgatggttcttaccgagtgactatcaaggcaaaggatcataagaattcaactggtaaataccgtgctgatgcctacattgtagatgactctaacaaacgtttctatctcactgaaaaagtggtagaagttactcaaactcgccctagtgcaagtctcgttattgaaaataataatgctgatttaggtacttttgacgctgttatccgtaatatcgttgcaccaaatggggttaaggaagtcttagttccatcatggagtctagttaacggacaagatgatcttgtttggcacaaagctagtcgccaatctgatggtagctaccgtgttactattaaggctagtgagcataagaattctctaggcaattaccgtgctgacgtttatatcgtagataatgccaaccaacgtcattatgtcactgaaacaattgtggatgtgaaacataataaaccagtaggtaccatttcagtagttaataacaataaagatactggtacttttgatgtcattatcagtgatgtttatagtcctaaaggtgttcgtactgttcaagtacctatttggtctgaaaaagatggtcaagatgatattcgttggtatgaagcaacacgtcaagctaatggcacttatgcggtaaatgttcaagctactaaccacaaaaattcaacaggcttgtacaatattcatttgtactacattttaaatgatgggtcacaagttggtgtaggagggacaacgacaactcttgaattccgtaatgctaagactaaaacgcaaacctatatcactaatgttaattcagaagctggtagttacacagtagtggttgatcaggcaccacaaggacgtcaaattaagaatatccgtgtagctgtatggtcagaaagcaaccaaggaaacctttcttggtacaatacggcacctactggaacacatactgaaatcaatgtatcgactgttaatcataagaatctcattggtaactatacgactcatgtttatgtagactatgtagacaatactgtagacggattcaaccttggtgagacagctcttgctccacgtaatcgtcgtgttgagcctcagacgacttattattctcaacgtgatcctcgttgggcttctaagtggtatggtgtcagcaatatggatcaatctggctgtgttccaacatcacttgccatgacttttacagatatcttaggaactgtcattgcaccaacgacagttgcggattatttgtactacaatacaaattcatttaataaaacatcagttgctggtacagatgcagatggtattgtattagcaagtaaaaattggggtctgaagagcaacgtactttcaagtattgctaacattgcctcagctttgatgtcagggcaacacgttttggcggcagtaggagcaagtcaatttatcaattatccttacacgcatgaaatcgtacttcatggctatgataatggtaaaacatatgttcgtgatccatttaacgccaataacaatggatggtattcattggattacattcatggtgttcagagtagagatgcaatggatactaagcttggtgcaccattcttctctgtctttgcttaatctatcaatcaaaggtctttagaaggaaacttctaagggcttttttagtgtaaatttttgatagtcatattttgtagttatccattttcagaatattatatacacgtatgaaatcttatatttataggtttttaggttctttatttggataatgttgatacttttagcatggaaattacttatttttttatcatttttatagtttttttagagaattatcacttttgctctattcgtaagacattttctatggtaaaatgggtgacgtattaaaaagtgtcaaaggaaagttaaatgcgaacaaaagattttatctactatgccagtgcagctgttctcatggcggtgactactcaggtagccagtgctgatgaggtagctacgcaaatgcctacggttactgaagggaaccagtatcaacctgcgacagcagcagaaatttttggtggtggggcagttcttgcacaagagttaccatcagcaagaccaagttcaactgttgcggaaacacctacagccacaagtgaagtagcaaactcaagtgctccacaagttagtcaagcaagctcaacaacgattgcagcatctgaatcaagagtcgttgcctctgaatctgtagttcaggctaacacagtagcgagttcagaaaatgcgacggtaccgactgcttctgaggtttcaagcaatatcgtggctgaacctgctaagttgactcatgcctcaggttcatctcatgatactgatattctaaaacctaaggctagcttctcaattgagaacaacaacaaggtcactggtacctttgatgctgtggttcgagatattgtggcacccttgggtgttaaagaggttcttgttccatcttggagtctagccaatggtcaagatgacttgatttggcataaggcagccaagcaaatggatggctcttatcgtgtaaccattaaggcggtagatcacaagggggaggctggcaattaccgtgcagatgcctatgttgttgatcgaacaaataagagacattatatttctgagaaagtagtatcggtaacttactctcgtccaagtgcaagcctaacgattgaaaataataatgcagctacaggcacttttgacgctgtggtaaaaaatatcattgctcctacaggtgtgaaagaaatcttagtcccatcatggagtctcgttggtggtcaagatgatttgatttggcataaggcgacgaagcaagcagatggttcttaccgagctaccattaaggcaagtgaccacaaaaattcaactggtaaataccgtgcagatgcttatatcgtagataattttaacaagcgtttctacttgactgaaaaagttgtggaagttagccaatctcgaccaagtgcaagcctaacgattgaaaataataatgcaactacaggcacttttgatgctgtggttcgcaatattctagcacctaatggcttgaaggaaatcttggtcccatcatggagtcttgttaatggtcaagatgatttggtttggcataaggcaagtaagcaagcagacggcagctatcgtgtgacgattaaggcttcagaccataaacattcaacaggtaaatacagagcagatgtttatctcgtcgataaggatgacaaccgtcagtatttgactgagaccgtggttgatgtcaatgaaactaagccaagtggtagtatttctatcttaaataacaatggtgctggcacttttgatgtggtcatcagcgatgtttatagccctaagggtgtccgaacggttcaagtcccagtctggtctgaggctgatggtcaagatgatattcgttggtatgaagcgacacgtcaaacagatggcaattacaaggttactgttcaagtagctaaccacaaaaacgtaactggtctttacaatgttcatctttactatgttcaaaacgacggttcacaaatcggtgtgggaggcacgcaaacaaaagttactttgtcagaacctaaagccgaccttgccatcactggtttgaacaatgctacgggtagctatgatcttgttatctcaaacttggttgcgccacgaggctttaaagaagtcctagttccaacctggtctgaaaagaacggtcaagatgatatcatttggtacaaggcaactaggcaagccaatggagactataaggtaaccgttcgttcaagcaaccataagggtgatagtggtctttataattcccatgtctatttggttgacaatgatggtaaatacattggcctaggtgggaaacaagtgacacttgatattactaagactcaaggaacactgactatcataaacaacgataaaaatcgtggaacctttgatgttcttatcaccaatctgacgaatccaagtggtatttcaggtgtccttataccagtatggtctgagcaaaatgaccaggatgatcttgtttggcataatgccactaaacaggatgatggttcttacaaggtgactatttcagctagtcagcacaagtggaattcaggtaaatacatcgttcatggctatattgttgatgcctctggtaaaaatattggttttggggcaacttcagctgatgtggtggcacctaagaaaatcggttcggcatcaagaggaaattacgatgttttaaataaggttgtctatctggatgctggtcatggtggctatgatccaggtgcttcttattttggtatctctgaaaagagcttgaccttggctatccaaagtcgtgtgaaagctaaactagaagcagaaggctatcaagttgtaaccactcgcacaagtgatacctatgttgacttgacggatcgttcacgtgcagctaatgcttctgaatcagatatcttcgtaagtattcacatcaatgcttcaggaagttctgcagcacagggtattgagacttattattaccaaccttatgcagaatatccatcacgtattaatgcaacctaccatgctaatccgactcgattgagcatgagtgataccttggccaatgccatccagtctagcttgattaatgcgactggtgctcagaatcaaggcgtgaaacgtcaaacctttgcggtcttgcgtgaaacgacagcgccagcagtccttcttgaactaggtttcttgtcaaatcctcaagaagcagctcgattgaatacctctgcttatcaggagactttagctaacgcaattgtggcagggattaagcgttactattctatttataattaatagattgagagaatcatatggttctctcttttttaatttttaaatagagaaaacgcttgcataaatgaaagctaaatggtatattaaaaaacatgaaaacgttaacaaaaggagtttctatgaaaagaaatactcaagctaatgatggaaaaatccttcgttatagccttcgcaagtacaagttaggtttggcttctgtaaccattggagctatttttttgagcttttctgctgttcaagtcgtcaaggcagatgaagcagtgtcaacgcccgaatcaagcacacaagtagaaccagctgattctagtcttactaccagtggcctagtaactgaaacgccagcagctcctgtaacagctgagaatacctctgtttccaaggtaaatgagccagtttctcttccagaagaaaatactagccctactgagactagcaagctaactgaaactagcgaaaacacgccaaaaacagtaagtacaaataatagtcaagctcttacgaatgcgtctgaggatcctattgctgaggggactattcgcttgcatttccaagagttgccaagtcaagacaagtcgtctcttggtctttggacttgggatgatgttgagacaccatcatctcagaagggtgcctggccgacaggggctacctcatttgctgaagctaaacaggatgattatggtgtctatttagatgtgaaattgtcttcaacacctaaaaaacttagcttcttgattaataatgctgctggaacgaacctttcaggggataaagcagtcgaaattcttagccctcaaatgaatgaggcctggattgacaaggatttccaagtttacagctatcaacctatccctcaagaccacgttcgtatcaattatttccgtacggatgctgactatagcaataagtctgtctggtattggggtgacgttaaggatgctccaagcaattggcctgatggtgtcaatttccaaccgaatggtaagtatggtgcctacttagatattccactaacacaagcggcaaaatcgataggatttttactcttagatgagagtaaaactggagatgatgtgaaaattcaaccaaatgattataaatttagtgacttgaaaaaatctcgtcagcttttcgtacgagatactgatccgacagtctacaccaacccttactttgtcaaggatgtgcgtttgactggggttcagcagcttagtccaagcaaaatcgaacttagcttcaccaacttagacgaggtctcatctgaggatattcttaaagaccttaaggtgacggataaggatggtaacagtgtcactcttaaacagcttgacttggatgctaaacttaaaaaagctactttaacaggtgattttgctgcagaaaatctgccttacaaggtcactttgggcagtgatagttttaaaacatctgagagctggcaattaaaggatgccctctacagttatgatggtgagttgggtgctcgactagaagaaaatggtactaaggcacatgtgacactttggtcaccaagtgctgatcaagtagacatcattgtctatgataagaataatcaagacaaggtgctggctgaacacgctctaagcaaaggccctagaggtacttggcaagctgacctccttgcgactgattttggccttgaaaacttaactggttatttctatcaataccgcattaaacgtggagatcagtcagtaattgttcttgatccttatgcgaaatctctggcagcttggaatagtgacgatgccaacaagggacctgaacacaagattgccaaggctgcctttgtagatcctgctaattatggaccaaaagatcttgactacgctaagattcctaactttaagtctcgtgaagatgctatcatttatgaggctcatgtccgtgatttcacctctgacaaggctatctcagctgaattgaagcaccaatttggtacttttgcagcctttgcggagcgtttggattatcttaaagaccttggggttacccatattcagcttttgccagtattgagctactatttcgttaatgaattgcaaaatggcaagcgtttggatgattatgcctcaagcgatagtaactacaactggggctatgatccacaaaactatttctctttgacgggtatgtattctgaaaaccctagtgatccggctaaacgtattgaagaattcaagaatttagttgcagctatccatgcccatggtatgggtgttatcttggatgtggtttacaatcatacagccaagacagctatttttgaagaccttgagccaaattattatcactttatggatgctgatggcactcctcgttcgagttttggaggcggtcgtctaggtacgactcactatatgagccgtcgtgtcttggtggattccattgcttatttgactaaggaatataaagtagatggtttccgttttgatatgatgggtgaccatgacgctgaaagtatcgagcaagcatacaatactgcacgcgcccttaatccaaatctcattatgcttggtgagggttgggtgacttatgctggcgatgaaaatagccctgttcagcctgccgatcagtcttggatgaaagacacagataccgtagcagtattttcagatgatattcgaaataccctcaaatcaggttatccaaacgagggaacaccggccttcatcacaggtggaaaacgtgatattaataaggtttttgacaatatcaaggcgcaaccaactaacttcgaggctgattcaccaggagatgttattcagtatattgctgctcatgataatttgaccctttttgatatcatcgcccaatcaatcaagaaggatccaagtaagcctgagaataatgctgaaattcatcgtcgcttgcgtctaggaaacctcatggtcttgactgctcagggaacaccatttattcactctggtcaggaatacggccgcaccaaacagttccgtgatcctgcctaccgttatcctgtatctgaggacaaggtgccgaataagtcacacctcttagttgatgaaaagggtaatccatttgactatccttacttcatccatgattcttatgattctagtgatgcggttaaccattttgactggactaaggcgactgatagccaggccttcccagaaaatacgaaaacgcgtgcctttaccaaagggttaattgccctacgtaagtctacagatgccttcaatttcaaatcaaaagcagatgtggatgctcgtgtgacactattgacagttcctggtcaggataatgtcgctcaagaggatttggtattaggataccaaactgttgcttccaatggagatcgttaccttgtctatgtcaatgctgatagcaaggctcgtcagtttgatttgagcaagcttacaaatggtctatcctatatggttttagcagatggcaatcaagttaatctatctggaattagtgagctatccggtgttgcaatcaacaatcacatcttgaccttggacccactaacagcgactattattcgtttgactaatgctcagacaccaactgaggaagtagctaagccttctgagaagactgagtcatttggtggaaaagagactgaggtaactaaaacaagtgtcaagacctcaagtcaagaggaccttgtcggagatgctgagcttgttgctcatggcaataatcaggctgagactgaagctagtcgtcaaactggtaagcaactgccatctactggtgaaaagacaaatcgtggactctttgcaacaggtctcttaagcattcttagcctaggattccttcgaaaacgtcgaacaaaataattagtaacaacaggttatttcctgttgtttttcttttatttagaatcattcttatctgctctttagaatagttcttaaatagcctaaaaccgttgacagtgctggtttcttctgttagtttagaatatgttctcttacatatgagagaccattattgacttatcatcgttcgtttttcatatcgaaataacaaacgattcacatatataacgacaaatgtcgaacactatcttgaaaataggagacattcatgaaaaaacttaacaaacttggtgttgttcttttggcatcaggacttctattgacggcttgtgccaaatctggtaattcaagtaattctagttcaactagctcaaaactcacagccagtgagcaaaaacaattgaagcaggctacaagtgattacaagactttcgttgaaggcgaaatcgatcagcttttgaaagatactgaaggattcagtgaaaccctcaagtcaggaaatcttgaagaagctaagaaacaatacccattggttcgtatggcttacgaacgttcagaaccaattgccgaaagctttggtgagtctgatgtgaaaatcgactaccgtttggttgattacatggacgaaaataaatcagaagatggctggtcaggtttccaccgtattgaacgtatcatgtggcaagacaacacgaccgatggtacagctgcctatgcagatcaattggttaacgatatcaaggaactcaaggctaaaattgcaactgttaaagttactccagatatcatgctgacaggagctgtagacctacttaacgaagttgccactcaaaagattacaggtgaagaagaagtcttctcacacactgatctttacgacttccgtgccaatattgaaggggcagaaaaaatctttgaactctttaagccattgatccaaaagaaagatgctaagcttgttaagacattagagacagaattcaagaatgtcaatggtcttttggacaaacacatgactgatgagaaaaattataagtcatatacagatttgagtgaggcagatactaaggaattggccgaagctgtaactaaacttggtgaaccattatcacaaatgggtgttatcctagatgggaaataagaaaaatgactgacgaaaaatttttagataaaaaaatggaccgtcgtgaatttcttaaaaaagcaggtattggaggggctgggcttgcgcttggtctttctggtgcatctgcttttttcgctaatcaggatagttcaacaaaaaaagcccttgatggggatgaggatattagcttctatggtaagcaccaggctgggattacaactcccatgcagaaggcttgctacttggtggttctagatcttcatacaactgataaaaaagaagtgatccagctctttaaagactggacagactatagtagtaaattggtcgaaggagagctggtcaaaaaagatggttctaatgacctcttacctccaacagatacaggtgaaacagtgggactcaacccctatcgcttgagtctgacttttggtgtctcggctgattttcttaaaaagcttggtttggaatccaagcgtcctaagctcttccgtgatttgcctccatttccaaaggagcagttgcaggacaagtatacgggtggagatatcgttattcaagcctgtgcagatgatgaacaggtagcctttcatgctgtccgcaatctgatccgcaaaggtcgtaataaaatcaccatgaagtggagcaaatctggttttgcagctatcggagatcgtaaggagacgccgcgaaatctctttggttttaaggacggtactgccaatgttacgacggaaaaggaattcgacaaggttgtctggacggatagtaaagattggatgaagggtggttcttatatggctcttcgtctagtacagatgcacttggagacttgggatcgtaccaatttgcaggagcaggaaaacacctttggtcgctataaggaatcaggagcaccctttggtaagaaagatgagtttgacgaagtagatctgtcaaaactaccagtcgattcgcatgtgcgtttggctaaagaagtagaccttcctatcttacgtcgttcctattcttattctgatggcattgatgagagaactggtcagtttgatgcaggcttgatattcattgccttccagaaggatcccgaccgttttgtcaaaatacagaccaaccttggtgctgtagacaagatgaatgagtacatcactcatatcggaagcgggctctttgcttgctttgctggcgtggagaaaggaggctaccttggtcaagcactctttgaataaactcctcgttttgcttggacttctagctcttttcttgacatatccagttgctgctgaatcttatagtgatctctatattaaaatcacagatgcaacaacagctgttcaaaacaaggatcaagcaaaagctaaggaattagtcggtgagattaagaatgatttcgaaactaaagaaaatcacgattccaaggctggtaaaaaagttagcaaggctcttgatattaaaggtgatgtgacagaagaggacctaacctctatctcgtcagcccttcttaaatttgagaaagagcaaaatcctgttgatttggatgcggaaaaggaaaaacttgagacccgtctcaatccttatttcaagaacttacaggatgccattacggctaaagacctagctgcgacccgcaaaacttacagcgaattgaataatgcttggacgcgaaatgaagctgttgtccgtgaccatagtactgcctactacggcaagattgagacggccatttcacttttgcgaagcagtattgagacggagcctactgatttcaccagcatccagtcatcttatgatgatctcaagggtgggattgatgactttatcaagggcgttcctcttgataatacaagctcaagtttaaccctaaaagatggtattaaacttttggaagaagctcttggtcaattccaatcaggtgatgaaaaaacggctgcggcaactatgaagaagttcatcactatctggccaaccattgaaggtgacgtgagcacgactaacccaagcctctatacgcgagtggagagtgaaacaccggttatcatggttaaggggaaagaaaaagcttatcaggacaaactgcaagccttaattacagacctatcagctatcgataccagtgcttcttataatgcatttgatgccatgttgattctcttgcgtgaaggggttgaagccctcctcatcgtcatggctcttgtgacaactcttaaggcagctaagatgcgtaagggactcaaatgggtttatggcggagccattgctggtgttcttgccagcgtagttatagctgttatcttacaagttgtttttccagccgtaacttcgggctctaaccgagaaattattgaaggtggcgttggtatctttgcagttgcgatgatgattctgattggtatttggcttcatagcaagtcttcagtcaaacagtggaatgactttatggaccgtcagatgaagacagtgacggctactggaagttttgtatctatgtttgcccttagtttcttggctgtcttccgtgaaggtgccgagacaattcttttctatgttggtattatcccacgtatcacgacagctaatttcttgattggtattgctctagccattgcagttcttgttattattgctgtagctatgactaaagctagtcactatattaaaccgcatcgtatcttctttattttgacctggttgatttatgccttggccttcaagatgctcggtgtcagcattcatgcccttcagttgactaatatgatgtccaatcatttgattagtggtttcccaaccgttgattgggctggtatctatccaagctgggaagtcctaattccacaacttatctttattgctatcattgcctttgtaacggtgaaacagcatggcaagaagtaaggacgagatgaccattgttgagcatctggtggaatttcgaagacgttttattgcagtagtgatttgctttttcctagttttctgtatcactctgttgtttgctggggagctctatgcttatctgactagaggatttgataagcccttattggttctaggacctaacgatattctctggatttacattaacttagccagtctcatggcttttacggtcaccttgccttttaccacctaccagatttggcagtttgtgaaacctggtttgagggacaatgaagcgcgtgccatttttgcctatattccagctacttttgtctgttttgttttgggtctggcctttggttattattttgttagtccagctatcttagaagtgcttttaaaactaggtgaagggctctttgatacacaaattacagcacaaaactaccttatttttttactgcatacgacagtgcctttagcagtcctctttgaacttcccgtagttgttagttttttgacatctatcggcataataacaccattgtttctcacacattatagacgctatgcttactttgttctcttagttttggcggtcattctgacaccagctgactttattagcgacttggccatgactgctcccttaatcttgctttatgaagttagcgtaactcttagtaagctcatttataaacgtaaacaaagaaaatataaagataaatagaaaggagatctcatgggaattctacgtgatattggagctccaggacttatcattatcgtcctaggagccctcctcatctttggtcctaaacgcttgccagaactcggacaatctatcggtaaaatgctagccgaatttaaagcagccgtaaataagactgatgatgataaaaaagacgaagaagacaagactaaagactaagatctctatctaaaggttatcttcaagtttcttgacaattctaagcttttatgacataatacacttgtattgaatagtaagtctatatcataggcaagaaaagaccccaagctaacttccacataagctcggggtcttttttagcactatctatccttgtttaaccacttgtcgatcagacgaaggataacaccgaccacaataggtccgatgatagtttcgaatagtaaatccatcataggcaaactcacctcccttcgtaggcggtgtcgaggtgccaaaggatattatatcatagattgaaagagatatgtttagtgagtgataggaagtaaaagttagaatgtgatttaatcataccaaacaaaaaatcagcctcttgagctgatttttttatcttacaaactgatacgtttttctgtttcagcgtcgaagaagtgacctttagcaacgttgaaagtaaggttaactttttcacctggattatggaagtcacgcgcatcaacacgggcagcaaactcagtttctccaagttttaggtaaagcattgtttctgcaccaagaagctctgaaacgacgacttcagcatccacattggcatctggataaacttcttgaacaattggacggcttgaaacatcctcaggacggataccaaagataacttccttgccttggtaacctgtttctttcaagattttagcttgaccctcagagattgcaatatccaaaccttcagagttagtgatacggttaccatcaaccttaacattgaagaagttcatagcaggacttccgatgaatccagcaacaaatttattggctggctcattataaagttcttgaggggtaccaatttgttcgatacgaccgatagtaccagaaccatcagggtttttagtagaactcatgataacgatacggtcagcaagagtcatagcttctgtttggtcgtgagtaacgtagatggttgttgcgccaatattacgagtaattttagcaatttcagcacgcatggtcacacgaagcttagcatccaagtttgagagaggttcatccatgaggaagactttagcatcacgaacgatggcacgtcccatagccacacgttgacgttgaccaccagaaaggtctgcaggcttacgatctaagaactcagtcaaaccaaggctagcagcagcttcacgcacacgtttgtcgatatcgtcttttttatatttacgaagtttaagaccaaaggccatattttcataaacagtcatgtgagggtaaagtgcgtagttttggaataccatggcaatgtcacgatcttttggtgatttgtcattaaccacctcaccatcgatatagagtttaccttctgtgatttcttcgagaccagcaaccatacggagagttgttgatttaccacatcctgaaggacctacgaaaacgatgaattccttgtctttgatgtcgatactgaaatcttcgacagagtagtgagttgcatttgggtattttttataaattttatccagtttaagagttgtcatatcatttatcctttattatttaactgatccgccggttacaccttcaacatagtatttctgcatgaagataaagagaagggtgattgggatggcgatgataatagcacctgcggtaaatggaaggaaccattcattgatagcgtcttggttaagcatttgatagagtccaagggcaaccgtatatttatctttaacgtcaccgaggataacagatgcaaagatgaagtctacccaaggtcccatgaaggccatgagggcagtgtagacgatgattggtttagaaagtggcaaggtaatcttagtgaagatttgaagacgagttgccccatcaatcattgctgattcatccaaagagtaagggatagtatcaaagaaacctttcgcaatgtagaaaccaagtgctgctccagcagaatataccaaaaccaaagatgtcaaggtttgtgtcaaattgagggccttcaaaatgtagtagaccgcaatcattgacatgaatccagggaacatgttaagtacaagtgccaatttcaagaagccatttctgtgtttgaatttaatacggctaagtgagtaggccatacctacggtaatcaaagttgagaggatacatgtacatgtggcaacgatgaaggtattgatgaaccattttccaaatgggtaagcatcgctggtaaacagtttaatatagttattaaaagtgtaagttttagggaagaagtaaggcaccgcattagctccttcaccacggaaacttgtaaggaagatccaaataataggaatcaaccagataacagctagaactgtcaatagaatataagtaccagttaggtaaagatttttcttacgtttcattatttagcagccccttccttgaatgaagatgatcttgtgtaggccaagagactgaatgttgcagagatggcgaaaatcaagataccgataacagatgccaagttgtagtctttagcgctaacagtcagtttgtagagccaagttaccaagaggtcagttgaacccgcttgatagtattcagagttagtaggtccaccaccagtaaggaagtagataacgttgaagttattgatattaccgatgaattgttgaatcaatgatggtgccataatcaagagaatttgtgggaaagtgatgctcttgaagatttggaatttgcttgctccatcaatttcagcagcctcaatctgctcagttggcaagttcatgatgataccagttgcgatcaacatagtgaacggaataccaatccacatattaacaaagataatagagaacttagcccagagagggtcagtcaagaatggaattggtccattagtgagatgcaaggtttgaagcaaaccatttaaaggaccatggtcattaaggaagttacgcatcaaaagaagggatacgaactgaggaacggcgatagtaataacaaagagtgtacgccaaactttcttgaacttaagccccttagtgttgagcaagagagcaaggacaataccgaaaaagaaagttgttgctgttgcagcaactgcccaaatcaaggtccatgtcaaaagtgggaagaaagtaccagccatacgaccttgcaaaacctcaccaaaacttgagaaaccaacccagtcaaagagtgatttaggtgctgggtgattgtggtcaaagttagtaaaggccaaacagatcatgtaaatcaaaggcaagattgtgaagagcaaaactccaatcaatgggacagtcataagtcccatgtggaaacgaccatcagccaaggtcttgaagtcttcgataaagttaggaactttacgtccagactgtttgagagccatgagatgacgagcactcttaaggttacaccagtaaatataagcgaaaactgcacagaagattaatgatgcaagaccaaaaatcaacataagcattgaattatctccagcgacctgaacagtaagcttaaccccattaacttctttaatagcctcaccttgttcttgagtccccaaggtaatcatacctttaagcgcagggatgatttgaataacgaaggctactaagaaggcaatctcagaaaggaggaagagcaagcccttggtgaactgtttgttgaccaagtttgccaatcccattaccagaaaggacaatttgacatcccatgtaccttctttgaagacctggcgcataggagttgtgtcgtagattgtttgtgacatagatatctcctcagataaatgtttaattagtgatagataaagaggctaggaacctgacctgcctctttaccttctcatagttaggattcttatttagctgctgccaaatctttatcaaattgttgtaatttagtaaggaattgatcttccttgattttaccgttatatgcatcactcataagagcagcactttcagtccagaagactgacatttgactaagtttaggcataacagttgtgtactgatcagatgaacccatagtaattacagcttgtgcaagtgcatccttttgaacagcttcagaagcttgaacttctttgttagctgggatgatgtgacggtcttcattagtgaattggttattttgactgtctttgcttgtcaaagcttgtgccaattggtaagaagcagcgatacgttctgcgttacctttagatggtgtttggttaactgcgtaaagtttaacacccatgaaggctttttgttgaacgtcttgaccaccgatattaactgttgggtaaacagcaacaccaagattgtctttaccaacagctttagcagctgcagcgtagtcccatggtcctgattggaaagcatcaacagaaccatcttcgaatttagccatcatgttagctgaatcgacattaacaaagcctttattgtctttttgagctgcgataaacttaagaacattcacaccagcttcgttaccccagttagtacctttcacatcttcaccgttaggaccaaagagtgtgtcaccaactgaaaggaagagaggagcagttacataagcgttaacttctttcaagttgctaccaaatttagctttagaagtgattgtttcatatgatttcacatcttcttcattaagtttagatttgttgtagtatgtaacttgagtttcgataccgtatgggaaggcgtaagttttacctttgtattgagcacctacagcagcttgttcagtatcttgctcagcaatttcttttgagtattgctctgggatttcttggatagctccagcgtctaccaatttaccgagttggtcatgtggaagtgagaagacatctgcagcagtagaagcgtccttagtcaagttttcttgagcatttggatcttccatttcaaccatatcaactttgtaaccagatttcttttcaaactgtgctactgtatctgagtaagatttcttagcaccagttggtacccaaagtttcaaagtcttgctatctgagcttgagctcttgcttgagtttgagccacaagctaccaagagcgatccagccacaagtaatccagcactaccaagtaataccttttgccattttttcatttctatttcctccagaaatttagtttacgataaacattatgcaaccgtttccacaatctgtcaagtattttataaaaaaatttttaactttgtgcaaacgattgcaaaactaaattgtttcggttataattgttcttgtattttacgactataaatatttattagaatgagaggaaaataatggctacaattaaggatgttgcccaaaaagcaggagtaagtccttcaacggttagtaggaccttaaaagataatccagccatttctgaagaaacaaaaaacaaggtgcgggcggctatggatgaattaggttatgtccccaatcttgcagctcagatgttggcaactggcttaactcatagtttaggtgtgattcttcctcctttggcgaatagagaaaatatcagtcaacccttctatatggaaattctaacagcaattaatgaagaagcaagtcgcaattctcaggtcgtcagtattgccacaggtgctagtttggatgaattagttaaacaagtcgaactcatgcatcgccaaaaacgagctgatggtttcattattctctactctgagaagaatgatcctgttaaatcctatctcctaaaagaaaaagttccttttgtcgtcattggagctgcaggtgatacaaaagataaggttacctacatcgataatgacaataaggccttaggtaaggaagcagtgacttatttatcatctcatggtcataaaaaaataggttttattacggatgacctttttggtcaagtaggacaggaacgttatcgaggttataaagaagcagcagatgaactagaattagaaatcttacctgaacttgtattttcatctaaaacaatcgataagctaaagaaggaattagatagattttctccgacagctttgattgtcaaggatgaccttatcgcccttcgtctcattcaatggctaaacaatcaaggaattagagtacctgaagattatgccattatttctttcaataattctacttttgcagaaatcatgcatccgttcttgaccacttttgatattaatatccaagaacttgctaaagaaagtgtacaaagtcttatgggactccttaagtcaactaagaacaagtcacagaaagtcatcattccatttaaacttatagaaagagaaagcgtcttaacgcattcataatatcttaaggagaatctaagtagttggttagtaaattagccggctacttttttattttatgtaagatgactattttccggaatttactagaagcctcggcttaaaaacactctctcaaattgtaagcgtttgttttgcgaacatttattcaagaaaaaataaaaaaaaatctatttttttgctaaaaattcttgactaatgcaaacgtttgcattataatcataagtgtaaaaaataatttgaggtaaactttatgaacaaacgagcaagcggtgtattgatgcacatcacatcacttccaggtgactacgggatcggatctttcggtcaagcagcctatgactttgttgatttcttgaaagaaacaaaacaaacttactggcagatcttgccacttactacaacaagttatggggattcaccttaccaatcattctcagcggtagcaggaaatactcactttatcgatttggatttccttattcgtgacaagtttcttactaaagctgatgttaaaggcgctgactttggattagatccagagtttatcgactatgctaaagtttatgaagcacgtcgcccactccttgaaaaagctgtaaaagcaatcttggctgacaaaaaagaagctaagaagtttgaagctttcaaatctgaaaatgctaactggttagcagattatgctgatttcatggctatcaaagaacactttgataacaaagcgcttcaagattgggatgacaaaaaagcagttaaacgcgatgaggcaactcttgaaaaacttcgcaaagaacttgctgatgtcatcacttaccaccaagtagtgcaatacctcttctttagccaatgggcagaacttaaagcctatgctaacaaaaatggtattcaaatcattggtgacatgccaatctacatctcagctgatagtgttgaagtttggactcaaccacacctcttcaaactagatgccgaatgtaaaccacgttacattgccggagttccaccagataacttctcagcaactggacaactttggggtaacccaatctacgcttgggataaacataaagcagaaaactatgcttggtgggtattccgtattcaagaatcattcaaactttatgattacttgcgtatcgaccacttcaaaggtttctctgacttctgggaaattcctggtggagatgaaactgctgaaaatggtgaatgggttcctggacctggttatgacctcttcaaagtggtcaaagaagaattgggtgatcttaaaatcattgccgaagaccttggtaacattgatgataagacacgtaaacttcttgcagactgtggttaccctggaatgaagattgttcaatttggtttctacgatactactggaaacagcattgatattccacatgtatacacacaacattcagttgcttacacaggtacacatgataacgaagtaatcaacggttggtacgacaacttgacgcaagagcaacgtgattacactgatgcttacattaaccgtcgtcaaggtgaaccaattacacgtgctctccttcgcacactctttgctacagtaagcaacacagctattgcgactatgcaggatatccttgataaacctgaaaatagccgtacaaacttccctaacacagttggtgaaaactggaaatggcgtatgcttccaggtgaaatcactgtagacaagaaagaatttttgacagacattacagaaagatataatcgaggtaataactaaaatggctacatttacacaatatgttgaagcaaaaaacaaaaatcttaaggacctttcaaacgaagaaatctactaccttttgttggaattcgtaaaagaagcagctgctccaaaacctaaaaacgatagcaaacgtaaagtttactatatctcagctgagttcttgattggtaaacttttgtctaacaacttgatcaacttgggtatctacaaagatgttaaagctgaattggctgctgctggtaaatcaatcagcgaagttgaagacgttgaaccagaaccatctcttggtaacggtggtttgggtcgtttggcttcatgtttcatcgactctatggcaacacttggcatcaacggtgaaggtgttggtcttaactaccactgtggtcttttcaaacaagtcttcaaagataacaaacaagatgcagaaccaaactactggattgaagatcaatcatggttggtaccaactgatatctcttatgatgttccattcaaaaacttcacattgaaatcacgtttggaccgtttggatatcttgggttacaaaaaagaaactaagaactaccttaacctcttcgatatcaatggtttggattacggtttgattgaaaaaggaatcacttttgatcaagacgaaatccaaaagaacttgacacttttcctttatccagatgattcaactcgtaaaggtgagctattgcgtatctaccaacaatacttcatggtatcaaacgctgctcaacttttaattgacgaagctatcgaacgtggttctaaccttcacgaccttccagattacgcttacgtacaaatcaacgatactcacccatcaatggtaattcctgaattgattcgtcttttgacagaaaaacatggatttgaatttgatgaagcagtagcaatcgtaagcaaaatggttggttacacaaaccacactatcttggctgaagcccttgaaaaatggcctcttgactaccttgaagaagttgttccacaccttgttgttatcatcaagaaattggatgctatcattcgtgaaaaatacgaagatccacgtgttcaaatcattgacgaacacaaccgtgttcacatggcacacatggacatccacttctctacaagcgttaacggtgtagcagcacttcacacagaaatccttaaatcttctgagttgaaaccattctacgacctttacccagaacgcttcaacaacaaaacaaacggtattacattccgtcgttggttggaattctcaaaccaagaacttgctgactacatcaaagaattgattggtgatggttaccttactgacgcaactcaattggaaaaattggctgcctttgcagatgatccagcagttcacaaacgtttggctcaaatcaaatatgataacaagttgtcacttaaacgttatcttaaagccaacaaaggtatcgatcttgatgaaaactcaatcattgatacacaaatcaaacgtttccacgaatacaaacgtcaacaaatgaacgctttgtatgtcatccacaaatacttggaaatcaaaaaaggaaaccttccaaaacgtaaaatcactatcatctttggtggtaaagcagctcctgcctacgttattgctcaagacattatccacttgatcttgtcactttctgaactcatcaacaatgatccagaagtaagcaaatacctcaacgttcacttggttgaaaactacaacgtaacagttgctgaacaccttatcccagcaacagatatctcagaacaaatctcattggcttctaaagaagcttcaggtacaggtaacatgaaattcatgcttaacggtgcccttacacttggtacaatggacggtgccaacgttgagattgctgaattggtaggaccagaaaacatcttcacatttggtaaagactctgatacaatcattgacctttatgaaaaagaaggttatgtaccacgtgattactacgaaaaagatgctaacatcaaagcagctgttgactttatcgtaagcgaagacctcgttaaagttggagataaagaacgtttggaacgtctccacaaagaacttatctctaaagactggttcatgacattgattgacttggctgaatacatcgacaagaaagaagaagtatacgcagcttacgaagatcaagatgcatggaacaaaaaagttgtttacaacattgctgaagcaggattcttctcatctgaccgtacaatcgaacagtatgacaaagacatctggcacacaaaataatattctagttgcatagaaggaaaacaagatcagaaatggtcttgtttttttttgcataaaaaaacacagccaatagataaattagctgtgtttacataaataatgttatgttacctatgagtgataattcaatatattattcatatattcttttttatttgatgaatcataagttttagatgttgagtattttagataatggatttcattttttgcatttctggattcttcttgtaagtaagaatctgtaatggtaatcttaaaatcctcgctcttacctgttagatcaaggcttagcgggaaatttgtaaattcatctgagtaaaaggccattttataaaagttgtacctgtcacctctaaatgaatttaagtgagggaattgtatatggtagatgccattccaataatttccatactctctaatttcgtagtcatcgaagaattcctgaattctttctttgttagcaaaatccttatcaaaggtaacaaagggagcctgccaatcccagagtgggatgtctccttcatttccgtagataatgtagctttgcatttttcctgatttaggattttttaaccgaaagtggtattcactgacaccatccttgacagcaccagtttgataaagggtatcgccaggaactatcataaacaggaagtcccttagatataactcgaagtcggcatccattgttttatcatgtaatccagggaaacgttgaatcatttgtctgtaattctctgcattcgaaaaccattcttcatcaaaacccggaccaacctcaaaaactttacgatcaaaatagcgttcataacggtcgaagaagttctcagtagaagtcacctgtccaaatggtaaagtgattttggtcttatcagtaaaagtgatatgcaataaaagtctgcggggatcaattcctttatcgacataatggccgaccttatatgtagacagattatcagggaaatcgtcttttccgaagtgtaggacctcaatctcaatatctttgacaacttttctttgaggtattatcttcttaacgctgtaattataggctttgtaatagtaattgtttttatcgtagagataaggcttataagctctttggtaggcattatagagaaacattccaagagcgaccaaaagaagcagagcaaatgctattttgacctttttatttattttattggttagtctcgagaaaaagagacttaatttactaggattttgtatcattccaaaactccccatatattttttactattatatcatgaaaatccttatacctaaggcgtcttcgtgtactttgtcaccgttttcctttataatataagtatcacattacaagaggagacctcatgaaatatattgtaaacacatcaaatgatcctgcctataatattgctttggaagcctatgcctttcgtgaattggtgaatgaagatgaactgttcattctttggattaaccgtccagctatcattgttggtaaacaccaaaataccattcaagagattaacaaagaatatacagatgctcatggtattaaggtcgttcgtcgtttgtctggtggtggcgctgtttatcacgatttgaataacctcaactatactatcatctctaataaggcagatgaaggggcatttgactttaagactttctctcaaccagtaatcgcgacacttgctgatttgggagttaaagctgaatttactggccgaaatgaccttgaaatcgacggtaaaaagttctgtggaaatgctcaagcttactataaaggtcgtatgatgcaccatggttgcttgctctttgacgttgatatgtccgttcttggccaagccctcaaagtcagcaaagacaaaattgaatcaaaaggtgttaaatctgtacgagctcgtgtaacaaacatcgtagatgaattaccagaaaaaatcacagtaaatgaattctcagataaaatcttggaaaaaatgaaggaattttaccctgatatgactgaatacgtcctttctgaggatgaattagctaaaatccaagagtcttatgagaagcaattcaatacttgggactggacatacggtcaatcaccagaatacacagtagagcgtaacgttcgttacccagctggtaagatctcaacttacgccaatgttgagaattcaattattaaatctgttaagatttacggagatttctttggtatcggggatgtatctgatattgaagagttgctggtcggtgtaccttacgagtacgaagatgtcttggctaaacttaaaaccattgacacaacacattatttctcacgtatgacaactgaggaggttgcaaaagctatcgtagcttaatcattgtttgaacaatctggaaaactccaggttgttttttcttgggaaaaattctataagtaaataatacgttataaagatttttaaaaatcaaagaacgataaagatattttcaaaagttggtttaggattgatttagtgtggtttttatatattcggacattaaacctgtaaagcctttaagtgaaaaacagcttataacatctttccgaaaaactgtaattttcttgaaagaaagataagggtgtgatatacttctattaagtaactttggagaaaaacaaatgaaacgtgaactcttactcgaaaaaattgaagaatacaaatctcttatgccctggtttgttctggagtattatcagtctaaactatcggtaccgtattcttttacgaccttatacgaataccttaaggaatataaacgcttttttgactggctgattgactcaggtatttcagatgctcatgatattgcctcaattgacatcaaaacactggaaaatctaactaaaaaagacatggagtcatttgtgctctatctacgtgaacgtccgtccttaaatacctattccaagaaacagggagtttctcaaacaaccattaaccgtacgctttcagctctatctagtctctataagtatttaactgaggaggtcgagggtcctgacggtgagccatatttctatcgtaacgtcatgaaaaaagtttctactaagaaaaagaaagaaactctagctgcacgtgctgagaatatcaagcagaaactttttctaggcgatgaaaccatggaatttcttgattatgtcgaaaatgaatacgaagttaagctctcaaatcgcgcaaaatcttcgttttacaagaataaagaacgtgatttagcgataatagccttgctactggcttcaggggttcgactttctgaggctgttaacctggaccttaaagatatcaatctgaaaatgatggtcattgatgttactcgaaaaggtggcaaacgagactcagttaatgtagcaagttttgcaaaaccttatcttgagaattatcttagtatacgtgataaacgctataaggctgaaaagcaagaccttgccctatttttaacggaatatcgaggtgttccaaaccgtattgatgcttcaagtatcgaaaaaatggttgccaaatattctcaggatttcaagatacgtgtgactccccataaactacgacacactctggcaacacgtctttatgatgctaccaagtctcaagttctagttagccaccaacttggccatgcttccactcaggtcactgatctttatactcatatcgtcaatgatgagcaaaaaaatgctctagataatttataattaccctagtctaaccattcctatttggagtggttatttcttagtttacataaatttaattatgctaaaagcattttgcgatcatacataaacataactaaatttatgtaaaatattacacacaaaaaacaaactctcctccatggaaagcttgttttacttattaataatctttaagggcagattcaacggctgctttttctttttcaatcaagtttactcgtgcggcaattgtcttaattcccatcaagatattacgttctaaggctttatcacttgattgtggctcgaagaaagcaatatattgatcaagacgttcttgcgttttaaagattcctgctgggatattaacaaagctatcaaagctcatatcgccacctagggctgccttaatccaatcccagttatctttcgcccagttccaaacggtttcttgtgcaaatgatttgctgaggaaattcatataccataggtacaagtcttgaggtttaacgacatgtttgtctttaagctgacctagcacgtagtcgagaccttcttggtttttaaggtatgaaactgcttgagtcaattgacgacggaaattactatcatttgttgttacatatgcattgacatagtcttcaacaagagttagactgttttcttgtttcatttggttaatgagaacgagaccacggacacttgcagggatgctttcaatgttctctttatgagcttggaaaacacttgcggccgcaaggactgctggttgatagtctgcttgaatcaagtagctgagagctgtttgacgaaccatttcgtcttcatctgattctccatctttggcatcgaaaccaagacgctcaaagtcgttttggaattgacgacgtactaaagccttgtaatgcacttctgcttctgtatcctcatcgataaagcgtttcaaaccagcgaggatttgagacttagcttgagcaatcaagaagctttcttctttttcgacaagatcaagaagagcgactaggcttgcatacgagatacggccactttcagcaagaagacggcgttcttgcaaaatctgaagtttacttacagtatcaaggttagcaaattcctctaagagttgatccaagagttcaccttgataatctgtgatgtaatgtgctgtatttgctgtattaaggcgaagagctcctttattttcagcagcaagctggttataatttggaatctcaatacgctcttctgagagtgtgtctgggagccccttccagtttgtgttcaatggaatctcccaaagacgacctttatcttcatgttcaccaatgaagaattgtttttgactaagaataagagtgtcgtcaactacctctgcactaacaacagggtaacctggttgctccaaccaagtatccatgaaactagagacatctttaccagaagcatcagagagggcattccagagatctcgtccaatagtgttgttgtactgatgtttttcgaagtaagctttaagtcctttagcaaaggcttcgtcacctaaccaacggcgaagcatatgcatgagacggctacctttagcataaacgatagcactatcaaagagggtattaatctcatctgggtgattgacttccatgtggacagactgaacaccgtctgtagcatcacgttggagggcatgaggtacaccagttgtttggaaatcttcaaagatattccagctaggctcaatagcatctactgaaacatactccatcatattggcaaagctttcgttaagccagagatcatcccaccatttcattgtaacaaggttaccgaaccattggtgagccaattcgtgggcaactacaagggctacttgttgacggcttgcagctgagctattttcatctacaagaaggtaaacttcacgataggtaacaagtccccagttttccatggcacctgctgagaagtcaggaagtgctagatggtatgacaatgggataggatacttgacttggaagtagtcttcgtagaaatcaatgacacgaacggcaatatcaagggcaaagtcaacgctgttttcagcttgtgcaactgtagcgaagacaccaacttcagtaccgttttgtgttttcgctgtcttaccttgaagagctccaaaaccaaaggcaaggaggtatgtagacatacgaggggttgtttcaaaagtccaaactccagtctcttcacgcaaatggctattgatttcaggcatatttgacaaagcgatatcgccttcttcagcatcaaatttcaatgagaaatcaaaagtagctttagcttctggttcatcaacagatgggaaggcttcacgcgcaaaatgagattcaaactgagttgaaataatttcttttttctcaccattgtaggtgtaatatgatgggtaaatccctgtcatattatctgtaatacgaccagagaactcaatgacaagcgtcaaaacaccggtctctggaagttcaatatggaaggcttcgttagcatcatccatttggaagtttaacgattcattatccaagagaacggaactaatggtaaggtctttttggtgaagggagatatggttatcaagggcttcacctgtaatggcaacattccctgtaaaggtcttttcggaacgattaatgtccaagaaaagattgtaattttcagggatgaaactttcgataaaacgagcaacagatgctgtcatacgtatatactcctaatctaacttttcgtatcgaaacagactgacaaatgtttcgatattagactcttttacaaaagaaaagggtctgaattattcaatacaaacccattataacatagattggaagctttgcctacagttcaatgattttaccagatttgaggtagacaacccattcgcagagattgcgggcataatcaccgatacgttccaaatacataagtacttggaaatattctttggcagcgaaggcagcatctggattcttacgaacaccttctactgtcatggcttgaatatcacggaaatagttatcaatgatttcatctgaagctgcgatttcataagcgcgtcgttcgtcactgttcaagtaaacatctagagcatcttcgaccatgtggcggactgctttccccattttcttgatttcagcttcaatttcagttagacgctcttcacctttaatgcggatggttgctttagcgatagcaacggcatggtcacccatacgctcaacgtcgctagatgctttaagtgcggtgataactgtacgcaaatcacttgatacaggttgctgtagagcaataatttcaagtgattttttctcaagtttggtttcgtagttattgacgatttcgtcattttcaatgacttccttagccaaatcacggtcatggctgataaaggcacgtacagctttcttaagctgagctgcaacctctgtacccatagcgtaaaattggttgtggagtttttctaattcttcttcgaagggagttcgtaacatcataatttttttagtaatctgtcctttcttaaccgaatttaccggtaatataatcttcagtttctttatgttgtggatttaggaacatctctttcgttgatgaatactcgatgagttctccatcaaggaaaaaggctgttcgttgtgagatacgacttgcctgctgcatagaacgagtgactagcaacaaggtgtattgttctttaaggttatagagggtttcctcaatcttaccagcggatatagggtcgagggccgacgttggttcgtcaagaaggataacctttggagatgtggctagtactcgtgcaatacagacacgttgttgttgccctcctgaaagtccaagtgctgagtcatggagacggtctttaacctcttcccagattgaagcaccctttagtgattcttctactgcttgatcaagaacagccttatctttgataccattgatacgaaggccataaaccacgttttcatagattgacattggaaaaggattgggttgttggaagaccattccgatttctttacggagttcaacggtatctgttcgaggactgtagacattgtgaccgttgtatgaaacagcaccagtaagtgtccattcgggatttaaatctcccattcggttgatagaacggagcagggttgatttcccggatcctgaaggaccgataagggccgtgatttcatttggatagaaatccattgtcacattattgagggcttttttcttattgaaatacaccgataaatcattaattgaaatgattggttcagtcataagtgctcctttctatccaaagcgtcctgatacatagtcactggttgactgtagggcagcatcttggaagattttcttggtttcatcatattcgataagatcaccaaggtagaagaatgctgtataatcactagcacgcgctgcttgttgcatattgtgcgtcacgatgataatagagtaatcttccttaagttcaaacatggtctcttcgagctgcatagtagctacagggtccaatgaagctgcgggttcgtccatgaggagaatctgcggtttcacggcaatagctcttgcaatacaaagacgttgctgctgaccacctgagagggtaaaggcagatttatgaaggtcatctttaacttgatcccaaagtccagcttgcttaagtgatgtttcaacaatctcatccaaggtttgcttatctcttacacctttacgttcgtgagcaaaggtgatatttctgtaaatagacttggcgaatggatttggacgttggaaaaccattccaatatgtttacgcatttcataaacattgatattacttgcgttaacatcgactccttgataaaggatttgtccagtaaccttagcaatatcaatcgtatcattcatacggtttagactacgaagaaaagttgatttaccgcatcctgaaggcccaataagagctgtgattttatttttctcgaattgcatgtcaatgcctttgatggcttctttttgaccatagtagacatgcaagtcctttgtttcaagagcgagctccttctctgggaaggtgataatatgacgctcgtcccaattatattttgtcatgataactcctttaagcggatgttaatttcttatggaggtaagctcccaaacgacgtgcaccaaagttgaaaatcagaatgaaaatcaagagcactgctgctgaaccagcagatactgcagtggcgtcaggtgtcgtaccttctgagttgaccttccagatgtgaacagcaagtgtctctgcttggcggaaaatcgaaattggactagagatgctaagcggattccagtcgctccagttaagtgctggtgcagattgacctgctgtatagataagcgctgctgcttctccgaaaatacgaccagaagcaagaacgataccagtaacaataccaggtaaggcttctggaacaacaacgtgacagatagtttcccatcgagacagacctagagctaggccagcttcacgttgggtatggtgaacggttcttaagctatcttcaaccgtacgagtcatttgtggcaagttaaagacagttaaggccaaggcacctgataggattgaaaatccatactgaaattggacaacgaaaatcaaataaccaaagagtccgaccaccactgaaggtagtgaagataggatttcaatacaggtacggacaaagttggtaagtcgtccttttttagcatattctgataagaagatgccagcacccattgaaagaggcacagaaataatcaaagtaataaccaataggaagaatgagttgtagagttgaaccccaattcctccaccagctttgtaggatgatgatcgactagtcaagaaagaccagctgatgtgtggtatcccgcgaaccaagatatagagaatcaaggctgccaggattgttacaataatgccagcaatcgcataaagcgtgctgatggcaattttatcaatttttttagcgttcataatttctctttctctcacgggtaatgaatttcaccagcatattgaaaccaagactcatcaataagagcaccaaggcgagagaccaaaggacattgtttgaaacagtacccatgactgtatttccgattcccatagtcaagacagatgtcaatgttgctgctggtgtcgttaaagaagttggaatcacggcggaatttccgacaaccatttggatggcaagggcctcaccaaaggcacgggccataccaaagataacggccgtgaagatgcctggtttagccgcattaagtgttacacgccaaatcgtttgccagcgtgtagctcccatggccagactagcttcacgatagtgacgaggcactgcacgaagcgtatctgttgtcataaaggttacggttggtagaatcatgacgaacaagacaaaggtacctgaaagaataccaaaacctgttccaccaaaaattaaacgaacaaatggaaccacgacttggagaccaataaatccataaacaacggatggaatcccgaccaaaagttcaatagcgggttgtaggaatttagcccctttaggagaaatctcagtcataaagatggctgctccaatggcaaatggggttgcaaccaaggctgaaagcaaagtcactacgaatgatcccaaaatcattggtagagccccgaatttaccttcagatggtgaccaatcaccactaaagagaaactcgaccaagctaactttattgacaaagaaagtcgccagccctttttgagcaacgaaaagtaaaatcatcgccacaatgaaaacaatcaaggccaggcaaaagaaagtgattgttttaccaaacatctcgaggcgtgaatttttagagggtgatgttaattgtttcaccaattcttcatttttcatgcttagtcctcactcttctttgagactttaccatcagcatccttggtaactttcatgctatggatggaaatgtaacccatttttgcgacgacgttttcttggacttcgtcactcatcatgtaatctaagaattgtttggtatagctatccggttttcccttggtatacatatgttcgtaggaccaaatcggccaatcgttagttgcaacattttcagctttgggttcaaatccatttaacttcaatgttttaacagaatcatcaaggtaagcaaatgataggtatgaaatagcacctggtgtctgagcaacaattgacttaaccataccgttagaatcttgctcttgggtgcggattggtgatttaccatccataatcactgcatcgaaagttgcgcgtgatcctgagctagctgcacggttaataatagtaatctctaggtctttaccaccaagctgtttccagtttgtgatttcaccagtgaaaatcttacgcagttgttctgttgtcaagttatctacagagacttctttgtttgtaataactgcaatcccagcaacggcaacttgaaagtcaacaagcttactagcatcaattcccgatttttcctcggcaaaaaggtcactgttaccaatttgaacggcaccggattgtacttgagaaagtccagtaccagaaccgcccccctgaacgttaacgatattgtcagggttcttttcagcgaacccatctgctgccgcctccactaagggttgaagggccgtagagccaactgctgtaatggactggccacggtcaatccaagaggcacagccagttaaaaccagcatggccattgccagtgacagaatcactgcaaggacttttgtttttttcatttttgtcctccgacattttgtaacataagtaagaaagcgtctcatagatatgctgttaaaagacacctatctaattataacaagtataggataattaagtcatattaaagtttggttacaggttcttaaatgtgaaatcttaatcttttaggatagtagtttttaaccgtatttccgacaactttagcaaacccaaaaccattgccgtccactaaaagctgataccaaccgttaggatgtgtttgatctagagtaaccacattaccagaaacgtattgggcaaactggtcttgacttagctctatacttgaaacaacttcatcagacgttaaagcaattccaagagcaaaacttggttcgaaacgtttcttcttgaagacaccaagatgcaaaccgttacgagcgattttaactttagaaaggtctggtagcccttttggaagcaggtagagattgtccccaaaaacttgcagcaaaccatccagtctagttttaaggtgtttttttgcaaaatcttcccaaagttgcttctgctccttgtttaggttagattttccctctttgatacgtgtttgctcagacacgcgcttatcctggaattttgctacaaactggccttcacctttgaaatggtgtggatacattcgagctgtttctggaaaatcaattccatcactcatgccattcaatttagggattgccaccaattcaagatcaggattattttctaaaatccaagcaacaacaccttcattttcctcaggagaccatgtgcaggttgagtagatcaattgtccaccaggagcgagcattttcaaaccgtctgaaaagatgtccttctgtaattgtgccagttcactaggatactccttatgccaatattggattgcatcaggatccttacgaaacattccttctccagaacatggtccatcaaagacaatcgtatcaaaataatttttgaaaactttggctagcttatcagctgacgtgtttgtcacaataacatttctcgctccaaaacgctcaatgttttcaaccagaattttgctacgctttggattgatttcattgctgaccagcaatcctgtattatctaggtaactaagaagatgagtagactttccacctggagcagctgccaagtctaagacacgacttcccttggatggagctgccacttgagcaaccatttgagcagctggttcctgagaataaaccaaaccagttgcatggtcggcagattttccagaaattttaccgtaatggccccaaggtgtttcagggatagcatcaggaaagtccttctgttgctttttcaaagggttggtgcggtaggcggatacggcttcttgatcaaaagatgcaaggaagtcctcagcttcatctctaaggaggttattatatttttctataaagtctgatggaaattgcatagtttcctttctatcaaaaaactggactaaccaagagaacttgctgttctgatttgtccagtatggttttatgtttcaaattaattttctgagcccataatatgcttgatttcttcaagtctgtctttagggacaagcatcacagcttgacgactaaaataatccaatggttctccagtaatggtctcaaggtgataacccaatttttctcccataatacttgctgcggcatagtcccatgggtaaataactgaaaagtaagctaaaatttgaccagataggacttttgacatgcttaaaccagcaccaccgtagacacgaacgcccaaggtcttatcaataaggtcttttaagccgtgaaaatttttagcatacatagctccattgctagcgactaggcaacggtctaaaggtcggtttttatatgctggaagcaacttgtcattacaatacacatcaaactggccaccaccatagaaaagttgatcagccatgacgttataaatgaggccaaattttccttgcccctcttcatagtaggcaatcataacacaaaaattatcttgttggacaataaaattgaccgttccatcaataggatccaagacccagacatttccatctttgatattatgaaccaagccattttcttcagcgaaaatattgtctgaagggaaggaggatttaatacgtgccacgagtaaatcttgtgtttgtttgtcaatattagttactaaatcatcaaaagccgtcttttcttcgaccgtgatagttttacttaaactttctttaataaaagcaccggcttctttgatgatttctttggcgaaaatcagtttattttccaagtgatacaaatcctttatcttttgctttagcagctttgacagcttgataggttgaaaaaccgctagcttcttcaaaggccttgtctagttgtttttcaggcgctttgcctggaacaacggttttgaatgccttataggcttgcaagagttggtcacggtcaaccttgctctcgtatgctttttctacctgactcaaaaaatgaagcactgtggtaatttcctcagtgctccatgatggatcgagtgggtaggaataatttcctttagtcattgttaccctcaatttcagctcgaatggtcgcttggcgtaattcttgctttctataatcacgaggcaaaaaggcacgaatttcatcttcgttgaaaccaatttgcatgcgtttggtgtccataatgataggtcgacgaagaagatttgggtattcagaaatcaattgaatgagttccttgatggtcaaatcatccacatcgatattcagcttctgaaagacttttgaacgagttgaaatgatatcttcagtaccattttccgtgtaagacaaaatcttcattaactcatcgtgagttaatgggctcgtgataatattgtgttcgtcaaaagcaacttcatgattggtcaaccaggctcgtgctttcctacagctggtgcagctaggtgataaaaataaagttaccacgcaaacacccctttcactttaacattcctaatcattatacattatttgattagttttggctacgctttcttaaaatttttccgcgatttttttatcagcctccagttgagcacatagttcatcgatattattgaacttaatcatatcacggatataatccagccaaaaaacttcaattgtctttccataaatatcgccttcaaaatcaaagatattggcttcaagacggagttctgtccccccaaaggtaacgttttttcctaggctagtcatggaacgataacgtttgccatcaattacaacatcggcgacgtagacaccatcagctggtagaaaagtcctatcaataggtgctaaatttgctgttggaaaaccaatggtacgtccacgggcatcaccatgcaccacgatgccacgtgtagagaattcatggccaaggagtttattggcttctttaaccttgccttctcgtattaattgacgcacacgtgttgacgaaatcttttcaccatcgctttgttgctcctcaatgacatgaacattaccagaaaaattacgggctaggtagtccgcatctgttcgatgatgtccaaatttgtaatcaaagcccacaacaacctcttgggcttttagacgtttaatataacgagcaatgaaatcgtctgaacttgttcgagcaaaatcactattgaaatctgttaaataaagctgatctgttccataggcttcaaaaagatcacaacgtctcttgggtgctgtgatatgaaggaggagatcatccgtaaatcgttgaaaagtcagttgaggactctcgttaaaggtaaggacagctacttcaaactgtttgtcatcagcaatctggcgtgccttatcaaaaaggaccttatgaccacgatgaagcgcatcgaaatagcctaagacaagaacagtttccttttcctgctgaatatctttataatcgttaatagaagttattttcattgacttaatacttttctaggtttataaacttgatttcgcttttccataatggctagaaccttgtctcctaaaaaggccgcaactaagggttcttggctatcaatagcaataaaacgaccaaatgaaatttctttagcatcatcctcagtgacttgaacagctggtaggtcctgaacaccaaattcgatgggaaggaggaaggaagtatctcccgcttctaccatttctgaaatttgtgagagtgttagtgccgtatttaagtttagaccagctgaggctgttcgacgaagagcagacatatgactcgcgtatccgagtttagcacccaaatcgacagataaagtacggacataagtccccttgctacaagcaacacggaaggtgaattttgcggtgttgttttccaattcaataggagaggtacggacaaattcggtaattgtcacttgacgttgaggacgctctacttcttctccagcgcgtgcgtactcataaagtttctttccgttgaccttaaccgctgaatacataggaggaatttgtgtgatttctccctcaaaactagccattgccatatcgacggtttcttcatctaactctgtaaccggagttgtttgaacgacatctccactagcatcctcggtagttgtagaaaatccaatggtgatttctccctcgtagacctttcctgcttcagtcatgtactcaataacacgagtcgcttttccaaccgctataggtaaaacaccagtaacatctggatcaagggtacctccatgtccgatttttttctcttgtaatattttgcgtagtttaaatacagcatcatgactggtcattccagcctctttttttagattaataattcctgaaatcatacttttaattatatcaaaagcaatcctaaagagctaggtagaaacataaagaggcagagagcaaagtctcaaacctcttaagtattatagtcataagcaatcgcaggtctgctagcttattaatcgatatctctattaaggtcgctttccaattcaaagaaaggctgaatatcctgcacatattctaggacaccctgaaagtctcccttgtcatctctaacagctgcataggtaacataaacgaatttccctaaacgttcagatttgaaccacattggaacttggtcacgctccccactcttcagtaattcaaagattttcttgaccttatcaagcacctttggcggatgacaaagttcaacgtttcgtccaatttggctcggtgttcgtttaaaaaccatttcattggcgggaacattatcattatagtactggaaaatatcgtctttattgacgaaagtgatttccaaaggaagatggttgagaatgagattggcctgctccacagaaagataaccattgccaaaaggctgagtcgtttctctatctacgacagtttcagtttttggttttggagtgaagctgatggtgaactgcccttcgggagtgtcaataattcgggtattgtccagatgttcgtcactacttagttcagattgttcttgcgatgtatcagcatttacctcctcaaaacgctcacgcttaggtttccagacagctgtaggttttattattgcatagccataggcatcgctttcttcggcaatcgaaagccaatcgtcttgcgtgaaggtttcaagcagaatcataagtaagatagcctcttctttgaaaatcatggcttcaaactcttctgagaatgcttcgaaagactttgaaaattcttcaaaatcagcctctggaagttcttttagtttagcttctgccgctctaaaaagttttcggatgtcatcgtctactccccacatcacttttggaggggagtcatggccgtaacgctccattattggaaagaaaagcttttctttacgcgtataatgattatggaattgaccaagtagagtcatctgatgcttcagtccattgaacaggtcagatttaaaatcttcattttcaggcttactaatattttctatgatacgtcggatacggagaatagctgaacgtagggctaaattctcttgtttaaacacataaacagggtggccctcttgatcagcgtctgccacttccacatctgcaatagcacctttaaagaggttagcgtggacattacagaggctcattacgtcttcaaaggtaaccccatcttctgatgacatcaattcatgctccatcatagaaatttcgagggctgatactcccttgaagtattgattgaagcgctcttgaacactctcaggactggctccatggtgcaaatctagtagaatttctttgagtatttgaatacgattatcttccatatcagtcaccaattacgtcataaccattgaacagcaaggtttgcttaattttttctaagggaatatttgctaacttagatccagcctttagactagtcaccttaccgacagtatttagcatagctggattagacaagggcttgaaaccgagatcaatcagtaattccttaacctctggatgctctttaatgattgttgcaacgggttgtgataaatctatagtgttggtagtcataatgacctcctaataacatatttactacttccattatacacgagaataatgaaaaaaaaccaacaaatcttagtttgctggctttgttaattcgcaaatagggcttctgtaacattatgctggatattttcccactcctgctctgccctcaccatcttacggtggtaatcagcacgcccacgcaagtaggcagcaatttgataatcttgcttcacaattggtatctcaggaattttgatatccaagaggtcagctgtcgacaaatttaggacagcctttcccttatcagcatagtctaaataggcacgaccaatctctgtctcaaggaaaaacttgatgtagaaaccacggagtttttccttaggtcgtaatactgtgatatttgatgaagcgacaacttctcgtttgccctgattttcgaaaacagcaactttctgaaccgttcccttagaagcaataaggacatcaccgtcttctaagagaaatcgtaaaagtttgcggcgttcttcagaaaacgtctttaggtcatcgtaggcaatgccgttgggtgtcatatccgatagattaatgacagcaaattcgccaggttctgccttagcaggaacagcttttcctttaaattgatcgacaacatcgcctaaacgaacaagtttgtctgtattagcttcgtaatcgataatcagttgaggtctttctttttcagacattgaatctcctttttatattttactatccatattgagtattgctatacaataatagcaagaagctaatacttttgcaagtaaaaactgtaagaaaggcaaaataaaaaagagacctgagcctcattttataagcttttaaccgctgctactgctgcttcataatttggatcagtattgatattgtccaaatattcgacataagtaatcttattgtcagcatctgccactaaaactgcacgcgctaacaagtgccattcttcaatgaggacaccataatctttaccgaaactattatcatagtagtcagaaagcatgatggcattttcaagtccttcagcaccacaccaacgagcttgtgcaaatggtaggtccactgaaatagtaataactactgtatcgtctaattctgacaattccttattaaaggtacgtgtttgagttgaacagataccagtatcgattgatggaacgatagagataacttttttctttccatcgaattctgaaagtgattttttcgtcaaatctgttgtggtcaagttaaagtcacgcaaggtatctccaacttgaagttgtttgtcttctgctactgtaactggttttcaaataaatgttggcatgttagtcgtcctccaatactttttttactattgtactgtaaatatagcaataagcctaaacatttgtttagaacttttcaaacagaagtttaattttttcagcaataactacattaattgcaggaataacctcatccgcaaatttttttaggtagggataatcaccaatttgcactccatatatagcatttttgaaaagagaaatatcattttgatcatttccaaaagctacaaagtctttaccaaagtggtttaaaacagtactagccttggtcacacctttaggattaatgtaaagacacctttcgatatcatgataactaaggtctaaacaatccagtttgtttagattaaagataaggtcttcacgtatatcttcatgctctacaagtggaataacaactttgataggctcattaagttcatgaacaggcaaaatccttgctttgtttaatggatcaacatttgaaagaaaagggatttgctcaggattttgaatagcataattaaaggtatcatcaataaaataagggagattataagtatcacagtagctaacaatcgttcttagagcagaagaaggtattgtgtattgtgatactaagtgttcatcttgaaagacttcaccaccgtttaagccaactactgtcagctttctcaattctccttctaaaatactaagacagtctctgtaagagcgtgctgttgcaaaaataatttcatgaccatattttggtgcagttaaaagaaccttttgtaggtcttttgacatggtcataccatcaaaacatagggttccatccaaatcaaaaacaaatttcatagggatagtataacaaaaaaccagctaaagagctggttaaaatagttagtatcaaaatacttaaattttatcaagggctagttttaaatcttcaatcaaatcatctgcgttttccaaaccaactgagatacgaatttgatttggagtgacaccacaagccagtaaatctgcttctgccaattgttggtgagttgttgttgcagggtgcaccaccaaagattttgcatcagcaacgtttgctaaatctgagaagatttcaaggttatcaattacggtacgtgcttcgtcttgtccacctttaacatggaaagtgaaaatagaacctggacctttagggaagtatttttgtgccaaatcatagtaaggacttgatggtaatccaggatagttaactttttcaacttttgtatgattttctaaaaagtctacgattttttcagtattttcgacgtggcgttcgacacgaagtgaaagtgtttcaagtccttgcaagagcaagaaagcattgaaaggtgccaaggcagcccctgtgtcacgcaaaagttgtgtacgaagggcagttacaaatgctgctggcccaacatcacgcgtatagctgatattgtggtaagatgggtcctcgtcaaccaactgtgggaatttgcctgaagcttcccagtcaaatttaccagaatcgacgataagacctccaatagttgttccatgtccaccgataaacttagttgcagaatgaaccacgatatctacaccatgggagataacattgatgagatatggagttccaaaagtattgtcagcaaccaatggaatcttatgactgtgagcaatctcagcaattttttcaaaatcaggaatattgataagcggatttcctaaagactcaatcaagacaagcttggtattatctttgatagcagcttcaatttcttcaggattgtcaacatctacaaaagttgttgtgataccatagcgtggaagagtttcttttaagagattgaatgtcccaccatagagggttgtcgcagcaacaacgtgatcgccagcatgtgccaaaccaaggatagcataggtgattgcagccatacctgatgccgtagccaaggcaccaacaccaccttcgagggctgcaatacgttcttcaagtactgctactgttggattggtaatacgtgtgtaaatattaccaggctttctaagggcaaagagatcttcaccttcttgagcgtcgtcaaaaacatatgaagtggtttggtaaattggaacagcacgtgattttgtttccttgtcaggtgtttgtccagcgtgtaattgtaaggtttcaaatgaaaattctcgtgacatatgggtgtcctccaaaacaaaagttgtcttcattctacacccagaaaagctagctgtctaatagaaattttttatcaatgtgatagggagggcttataaaaaggacctttcagtccctttctatttcttcacaataggtgctacgcttgccaagacttttttaagtccaacttctgggaattttatcttaagctcctgtgtcttgccacttccagctacttctaggacggtaccatctccccatttcttgtggtgagcgatatctccgatttcccaatctgtagctgagttgccagagtctgaagtcttatcaaaaggtagtctcccagtagcttttgataatggctgagcaccagtatgtctttgcggttgtgcatttgcttttctggtctgaagcgcttgttgtaaactcatgccttgaccaaattgtgtaggctcttcctttgaaaaacgaacaccaaatgatgaattggctggacgtgctagaccttgatattgtaataaatcatctgaaatttcacgtaagaaacggctaggacgattatagctagtcttaccaaaaagcgtacgcgtattagcgttggtaaggaaaagaatctcttccgcccgagtgatacctacgtaagccaaacgacgctcttcttcgagttcatctggctcttctgaggcacgtgacaaagggaagactccctcttccaaaccaattaggaagacaactgggaattcaagccctttggcagcatggagagtcatcaaggttacctctgctgcttccatatcaccatcgtccgtatcagcaattaaagctaaatcgtttaagaaacggcctaaacggtcaatacctgtctcgtcttccgtaccatcggtgttggtttcgtcaaaattcttagtaacagacatgaattcttcgatattttcaatgcgcgcttggctttcaagtgtttgttgcatcgaaagagcatccagataaccagacttatccaaaacagcctctacagcttcagtgatgcttagtccatctagctggtcgcgtaggttcagaatcatgttagcaaaatcgtaaacgccctgagctgctttccccttaatcggtgataacataatattagctgaagcatctaggagactcatgttttgctcataggcaaagttacgaatcttttctagtgtcccaggcccaactccacgtttaggttcattaacgacacgttcaaaactaatattatccgcagggttggcaatcaagtttaagtaagaaatgacatcacgaatttctttacggctatagaacttggttcctccaaccatggtataaggaatattagacttgagtaaagcttcttcaatggtacgagactgagcattggtacggtaaagtacagcgaaatccttgaagttcttaccttcttcacgaataatgttatcaatagttgaagcaacaaaaacagcttcatcacgctcgtcattagcacggtaataaacaatttgttcaccgtcatcattttgagtccaaagtttcttaggacggcggttacggttgttcttgataacttcgttggctgcttggagaattttcttggttgaacggtagttttcctccaagaggacaaccttagcttcaggatagtccttctcaaaatcaaggatgttctgcatgtcagccccacgccaaccgtagattgattggtcagcatcacccacgacacagatattcttgaagcgagatgctaagagttttaccaactgatactgagcatggttggtatcttgatattcatccacgtgaatatactgataacgctgctgataataagcgagcacatcgggatttttgtcaaagagacgcagagtcatcataatcaaatcgtcgaaatccatggcttcactacgacggagctcttcctgataggctttgtaacatttagcaacgatttgagtatacatgtcaccagcttggtgctcataagccacttcatccaagaggtcattttttgcgttggaaatcgtccctaagatggcacgttcattccacttcttaggatcaaggttaagattcttgagaatacgtttcatcaaagtacgttgttcaccaggatccacgatagtaaagtttcgattgtagccaatatggtccgcttcacgacgaaggattcgcacgcacatactatggaaggtcgcaatcaaggtttctgaagttgctgggtttaaagccatagcacgctcacgcatctcacgagctgccttattggtaaaggtaatggccaaaatattccaaggattgatcattttttcgtcgataaggtaggcaatgcggtgggtaagtacacgtgtcttccctgatcctgcacctgccataatcaacaaaggaccttcagtcgtttggacggcttcggcctgtttgtcattcataccagttaataatgggttcatcatattctccattctcaaaaataagctctactattttatcattttttggatgaaaatgcagactctattcataatgagtgtgaaataactttagcaaataatcgtttgtttttattgggaggttgtttgcttaaaatgattgttattccaagcttttctaggttttggtgaaaggcattcttaagtataatattcggttttttatagttttgatgaaaattagtgttgacactgttcggttttttcgataagatagaaccacaataaaataaaaaccgagtgatgtcatcaggaagactggtgattgacggacttctggagagatcttgaagcagccttagctgtaaacaagacaccgaaggggcaaggggtaacaaccgaaactctcaggtaaaaggacagaaagcatcgcaagtttatttacttgtagtaatagctttgtattctcagaggtctggttaagccaaacctcttttttgacgtctcggttaaaggagattgttacattcatgttagacttttttactaccattgatgattttgtctggggtccaccacttttggtccttcttgtaggaactgggatttaccttacgcttcgtcttggacttttgcaagttcttcgtcttcctaaagcttttaaacttatctttgctgaagataaagggaaaggtgatatttctagttttgcagcccttgcgacagctcttgctgcaactgttggtacaggtaacattgttggggtagctacagccatcaaaactggtggacctggtgcccttttctggatgtggattgccgctttctttggtatggcaaccaaatattccgaaggtcttttggctattaaattccgtacacttgacgaccaaggtaatgtatctggtggtccaatgtattacatcacacacggtttctctggaaaatggcaaatatttgctaaacctttggcctacttctttgcctttgcaggtgtccttgttgcatggttggggattggtactttctctcaagttaactcaatcaccgcctcacttcaaaacagctttgactggtcaccaaaaatcgtaagtatcttacttgctcttataactgctgccatcatttttggtggtatccaatctatctctaaagtttctgaaaaggtcgtaccatttatggctggactttatatcctagcagctcttgtggttatctttacaaactttaatcaacttttaccagttcttgaaatggtcttccaatctgcctttactgggaaagcagccgtaggtggttttgctggtgcaacagtcatggtcgctatgcgacttggtattgcgcgtggtgtcttctcaaatgagtcaggtcttggatcagctcctatcgctgccgccgccgctaagaccgaagaacctgttgaacaaggtttgatttcgatgacaggtactttcattgatacgattatcatctgtacacttacaggtcttgctatccttgtaactggtcaatggtcaggtagcctagaaggtgccccaatgacacaagccgccttctcttctgtttttggtacatttggtgaaattgccttaacactttctttagttctctttgcctttacaacaatcttgggttggtcttactatggtgaacgttgtttcgaattcattttcaaatcaactaaattccttccactctaccgcttcatttttgtggttatggttgctcttggtggttacctcacacttgatgttgtttggaaaattgcagatatcgtaaacggcttgatggcattgcctaacttgattgccctcctagtgctttcaccaatcatcattaaagaaaccaaatcatactttgaacgccacaaataaagaaaagagctcaggctcttttttcttggctttatcagcaccaatccttgcgactactgctcttttgcgttacaatgaaattaaatcattttaaaacttatacagaaaaaatccaaaggaataactatgtcaattaccaaagaatttgatacgattactgccatttcaacgcccttaggtgaaggtgctatcggtatcgttcgcttatctggaaccgatgctatcgccattgctaataaagttttcaaaggaagaaatctagaatcagttacttcacatactatcaattacggccatattgtcgaaaatgagaaaaccattgatgaagtcatggtaagtgttatgcgtgcgccaaagacctttacgcgtgaggatgtcgtggagatcaacactcacggtggggttgctgtgactaatgaaatcctccaacttcttattcgttctggagctcgtatggctgaacctggagaatttaccaaacgtgcctttttgaatggtcgtgtggacttgactcaggctgaagctgtaatggatttgattcgtgctaagactgataaggctatggccgttgccgtctctcaacttgatggttcgctcaaggatctcattaacaacactcgccaagaaatccttaacaccttggctcaagtcgaagttaatattgattacccagaatatgatgatgttgaagaagtcaccacagctcttgtccgtgaaaaaacgcaagagttccaagcacttttagaaaatcttcttgccactgctaaacgaggaaaaatcctacgagaaggcctttcaacggcaatcattggtcgtccaaatgtcggaaaatctagtcttcttaacaatctcctacgcgaggagaaagctatcgtaacagacattgaaggtaccacccgtgatgtcattgaagaatacgttaatataaagggtgttccacttaagttaatcgataccgccggtattcgagacacagatgatgtggttgaaaagattggtgttgagcgttctaagaaagctctcgaagaggctgacctggttctccttgtgcttaatagctctgagccgttaacagagcaagaccgtacattactagaaatcagtaaaaatagcaatcgcatcattcttctaaataagacagacctaccacaagcaatccaaatggaagagcttcccgaagatatcattccaatttcggtcctcaagaatgaaaatattgacaaaatcgaagatcgcatcaatcagctcttctttgataatgctggcctagtggagaaagatgctacttatctctcaaatgcccgtcacatttcactcattgaaaaagctctcgaaagtcttgaagcagtcaatcaaggtcttgaattaggaatgcctgttgacctcttacaggttgatatgacacgtacctgggaagttttaggagaaattactggtgacgccgccccagatgaactcattacacaactctttagtcagttctgtctaggaaaataaacataactaaatttatgtaaaaaggatgcttagtcatctttttattttacatacataactccagaaataaaattatgtaaataaaaaactaccaatactataaagacgattgactcatgctttttaagaaagaaaatgctatcatggtattattctatgattttgaaaggttaatcatgagtcaagcagctactgatactgattttaaacatttgatagattttgatgataatctgcttccttttcgactggaggaaactatggtcgaaaatggacgccctgatattctatttcattggcatcctgagcttgaaatacagtacgtttatgaggggacagctcgctatcatattgattatgactattttgacagtcaggctggagatatttttttgatatgtcctaatgagcttcattcgattcatcccatagataatcagtctcatcatactgatacccttcattttcatttggatatgttgggacagtctctggtggatctgcttagtctccgttatcttcagcccttacagaattccaattttaagtttaaacaatgtctaagaccatcagacgaggggtatacggaaattaaagcacttctcttcgagatttttaagatgattcgtcagaaagatcgtcactatgaacttcttctcaagtcaaagttggaagaattaatctacctcctctacttctatcgtttggtaaagcgaaaaacttctgatgatcattatcgaaaaaatgataaaattcgtgaaatcattgattacatcaatcaacattatgctgaaaatctcacgattgaaaagttgtcagagctcatgggatatagtaagactcactttatgacgatttttaagcaacaaactggtacctcttgtaccgaatttatcaatcaagcaagacttaatgctgcttgcgaagagctccgtaatagtgttaaaccagttttagaaattgctactgatgttggttttaacaatttatcaaatttcaaccgtcaatttaaacactattacgaccaaacaccaagtcagtatcgaaaaacacatagcaacaacaagaaaacaaaaaagagttagccaaatggttaactcttttttatctgcaaacttcttagtatttctctttacctttgtgttttccactaagtccaaagagagttagcaacataccaagtccgaggagtccagcgtgtgaggccttgtcacctgttgtaggaagaacttcagtttgagcagaagcttctgccactttttctgtttctttaagtgcttcgtttcttgttgaaacgaagaatactttaccattaggtgtcgttactactttagatacaactggtttagttgttttaaggtcttcagcaacgctagatggcgtaacaggactcaatggattaagtgtagggtcttctgcattttcttttttgttcaaggcagcaaaatcagcacttgaaatagaaatggtacgtgagtttggattgataactgcatacttagataggtctgcatgtgtcaagtaatccgcaaagacggtatccattgaaggaccttcttcacgaggaccaccaagcatcgtgtagccatcaccaccagcagctaagaagtcattcgttacaaggtagtaagtttcattagagttgagtggtttataggtaccagtttctggatcaaaaatgtcaattgataagatacgtttttctgctggaagtgttgtgtcataataaacacgagctcctgatacttgaaggaaaccgccagatggttcaagaagaggttgaccattttcatctagaacagttttaccactttcgtcaacttggagaatagaaccaagagatttgacaaacatatcatggatattttgacctgtcacttgaatttgagcaactgagttaccaaatggaagaacggcaatgatatcacctttagtgattggtttgtcttttgcaattgtttcacgaagaccaccaccgtttgttacggcaaggttagacttgtgtgtgaaggctgattgtccgtaatctaagagagaatcagcgacaacattaccaaggttagtttcgcgaacacgaacgtccatacggtcaccgctaagtttaactggactattttcgataacgactttcgaagaatctgccttgtacttagcttggatgtcatcaatcatagttttaactgttgggttaacttgataattcttcttagcttcgtcgtgtgaaatcacgccatgtgacaagatacggtcagaattataaacgacgcggccgacattgttaaggtagctaccagtttggttgtaagtgacattatcgccgtatgtcgctgtgtgaagagtgtgtgagtgaccatcaaggacaagaacacgttttcctttcaaaggtgcatagtttgaaagagcttctgccaatgttgatccacgccattcaactggagttgttgtatctatacccaagtgactaaggacaatataagtcttgtattccttaccttcagcacgagcatttgattccacttggtcaacaacagctttaacctcagtaataggatcggtgaaagagacaccagtgatattacgtgggtgtgtcttagtagctgtctcaggtgtagtaacaccaataacaactacttcatctccatcaacaccaggtgttttgtcaacgattgtagatggttggaaaagacgtacgccgttcacataaacgttagatgtgatgattgggaaattgatttgtttgctcaaacgacgcaattggtcaagaccaaagtcgaactcatggttacccactgtcatggcatcaaaaccaacagcattcatgacgcttgccatgtcctcacccttagagctgtttgagattggaagaccttggaatgagtccccagagtcaaagacaagggttgttccttttgaacgagaatcattgacgataccagacaaaagggcatcaccaataactccgttacgatcatcttcaaccatacgaccatgaacatcgttggtgtgaagaacagttacagtgtcgttgctggcacttgtgctagcatttgtcacgacttctgttgtaggagttgcggctgcagttgctgtttcactggctgtggcaactggtgtctcgcttgtttcagctgtagaagcagtaacaactgatgttgaactagctactggagctgcagactcgcttgatgcagttgttgctgcagtagatgtcgcagtggtagttgcctctgtagctactacttcagtgcttggtgctgttacagctgcatgagcttctacctcgtcagcttggacagcattagccaagatggcagttgagacgagtagggttgatagtgtcgttgcaacgactgttttcttcttcattccaaaagacctttctgattttaaatcgcttttattataccacatttataagattagaattaaataaatttcaatattttattagatattcaaacaattttttcaaaaatcaataggtagctaaacgtttttcaagatagccttcaagcagttctaaagtaaagctcaaagtccagtaaataagggcgattaggatatacatagacatgtagtcatactcacgcccaccgataatcttagcattttggaaaatgtcaggcactgtaatcatagccgccaatgaggaactcttaaccatatcaataataacattaccaagaggggctactgctatacgcatagcctgaggtaagataatccgacggataatagacttctgaggaagaccaagagagcgagctgcttcccactgccccttatctacggcaactatggatgaacgaaaaatctctgccatataagcggcactaacacaggagaagccaataaaggcacaaagaagggcaggtagctgaacaccaacataaggcaaaccaaaataaagaatgaagagcacgaccaacataggaaccccacgcatgatggaaatataaatgcgggctggatactttaaccaaggcttttgagacattcgcataaaggcaaggatgatagcaaaaacattcccaaccataaagcttaaaagcgagattcctaaggtataaggcagacctgataggacataaggaatgctttttagaatcagtgaaaaatcaataatcataagtctaactttctaaacatttctttagcaaataagcgatccaattggatcgctcatattattcaacatcagagatgtcaatctcagtgtagtcaactttcgttttctttgtaacgtcttgaccagcaaagaacttctctgaaattttggtaagggtaccatctttcttcatgtctttgatagctttattaactttttcttgaagggttttattcttcaatgagaaagtaaagcttgttgagtaagggttactgtagataccatcgttgatcttaacagggtacctgtctttgatagcggctactgccatcttttgcaaatagtaatcattgacgataacgtctgtacgaccatttaccaagtcttgcatataaacgtcattggtaacattgtcatatacgacaagttcagcacccatttttttggcaatcttcatgtacttggtacttgcagcaccggctgctttcttgcctttgaggtccttccatgaagaaattcctgaattatctgattcacggactaccatggatgtaaatgaatacttgtatggttcagaacgcaagaattttttaacgttcatgttgtcatcttcgagtgagtagttagcgatatctacttgaccactatttacagcggtaagcatgccatccacgcccatctccgtgaagtcaattttcaacttaagacgttttccaacttctttgagaatctcaacgtcataaccagtcaaattgttcttatcatcgtggtagctttgtgggtaaagagttccagcagtcgcaaccctgatgctcccacgtttctcaatcttttcccagttcttctcacctgtactctgtgacgagcaggcaaccaaaaagaccgcagccaaaattaggctaaatacggcgaaaaaactctttttcatctatgtgtgtctccttaaaaaatgaagttaagttaaaaacttataatcttagcctatactatttaaaaaggtttcacaaaatattgaactgaaaatgagaatgtctagctaaaaaccgaacattcttccatctgttgggtcaagtgtaagaggaggtcctctcttcccttggcagctgtcagttgaacaccgagtgagagaccctgctcgtcccgatagacaggtaaagaaatcgatggttgtcccgtcaggttagcttgttgcgtgaaaggtgtccagtctaagctgtccgcaaacatttcccaaataagttcctgctgctttggccagtcaaaatcagccatatgtttgagttgattttgtaagttttcagaaagggcaaactgtccatgcttaggtgccacatccgcaactgttggtgttagaagaatatcgtaagtctcatgaaaattcgccatctgatggctatactgatcccactgggctagaattttagagtaaattttagcaggaatcttttgcccagattggaaaatagcccaagtcatcaactccatatcttcaagggtcatcttccgtcctaaaccagcctctatggaatcaaacatggcagccgtctcgacactattcatgatgtagtaagactgcatggcttcaaccccattcaagggctggtcgctgatttcatgcacataatgtcctagactttccaattttctagcagctttttttgtcgctgcaatagcagattcagacaccttaccaccaataggagagagagtcgaaaaagcaatcttcaaaggtttaactggttcttctaaagacactttgctaagcttcggtataataaagggactttccatctgacacgtctgcatgtgatagagtaaacgttttgtatctcgtacagtcttagtcaaggcaaactggacagaggctccctgccagccacggaaagaactaggaccgacaggaatccgtcctcttgtaggcttaagaccaattaggccgttaaaggaagctggaatacggatagagcctccaccgtcactagctggtgccaagggagaaatgccagaactcacaagagctgccgcaccaccacttgagccaccagcattacgtgtcacatcgtcaggcaaattaacaggaccgtgaatctgagcatcactgatatttttgaagccaaactcaggagtgctagaacgccctaaaataataaagcccaattcctcaaatttcttaacataattatctgtttccgttgcatgataacttgtaaatagacgagaacccgcggttgacggctcaccagcttgctcttgacctaaatcttttagaaaaatcgggactccagcaaaaggtttctctgagaagtctctagcttctgcttctttcaatgctttctcgtagcgttgactgacgatagcatttattttaggattcgtcctctccgcttcacgaatggtaacctccactagttctcggggactgaccgtcttatttttcacggcttgagccattgccgttgcatctgaccactcattaattgtcatcatatactctccctgcttatcttttcctaaattatactaaaaaaagcgaaacgcctaaaacgttccgccttaaatcttgataattagtcttgccaagtctcttgattttctttgaatttcttcaaaagttgaagtccatctgctgtgatgtagccttgaactttagcgactttgatcaactcagtgtagtttgaaagagtaaccaatttcacaccagcatccgcaaagtttttctcagcttttggcaattcgtaagtgaagatagcaacaacaccgataacatcagccccttcacgctctgcagctgctacagcatcaagtactgaaccaccagttgaaatcaagtcttcaacaacaaccattttttcgcctttaaccacacgaccttcgatttgattaccagcaccgtgatcttttggtttgctacggatgtaggcaaatggaagattcatcttgtcagcgatgatcgcaccgtgaggaataccagcagttgcagtacctgcaatcacttctacttctgggaattcttccttaatcttttccacgaaaccattttcaataagtgtacgagtttctggataagacaaagtaatacggttgtctgtgtagattggtgatttaattcctgatgcccatgtaaatggttcttcaggtttaaggtaaacagccttgatatcgagcaagtcagatgcgatttgtgatgctaatgtcataattattatcctccgtaaagcgttttctattctttattataacctaattccatctattttcctatgaaataaggtctttttgaaaatttattgaccgttccattggaccttaatgtcgtgataagctgctactggatcatcagcttgtgtaattggacgacctacaacaatgtaatctgaaccaatttgacgagcatcggcaggtgtcatgacacgtttttggtcaccaactgctgctcctgctggacggataccaggtgtcaaacaaacgaaatcttcatttgtcgcttctttgatttttgctacttcgtgtgctgagcagacaacaccatcaagacctgcttcagcagtcttcttagcataatgaaccactgattcttgaagtgtggtttgggtattttggaaatcacgcatctgctcttcagaggtagaggtcaactgtgttacagcaatcaagattggaccatctcccaagccctcacgcgcagccttcatcatttccacaccaccagccgcatgcacattagtcatatcaacgccaaggttagacaagacacgcatagctgatttcacagtatttggaatatcgtgaagcttaaggtcaaggaaaacactatggccaaggtctttaacgtagcgcacaatctcaggcccagcagcatagtagagctccataccaatcttcacatagagcttttcatcagcaggaaacttagcaaggaaagccttcacatcctcaaaagtcgggaaatcaagggcaataacaggacgattttctctcatttcttatatcctttcaaacaaaaaacctccgccagtcagcgaaggttgcacgaaaatagggcagttcctaccctttagtgatgccgtagcatctcagtacacctttctcgcctctctggactcgattaaaggttcggttcaatttgttctattatagcgcttttatatgggaatgtcaaagggggattttgttctaaatacctaatcttaaacctctacttctattgattatatccagttttacattgtaaaattttaatgtaaattttattgctttttatgtttttacactgtaaaatattcttgtaaaataagaaagaggtgttaacatgcttgaacaactattgaaaatgcatgctgaaaaaattcgagttaacagtaactctgatgaatatcagaaggtaatgaagcagatagaaaattatcaagtcgaaaagcacttgccatcggctaccatgctttatgatatactagataagctagcagatcttttagtaagtgataatatgacagacgatgaaactgactatttggtatggaaagataatattcatatcgaaaaactcgattcgggagattttataatttattacttggatcgtttctttatgagtatttcagaagataagaggaataacatatgggaaataattaaagaacgctatgagacgaaaaagaaaattaaacttaagaatgaggtaattgatacatttgtagttcagttacaaacaacacttaaggctcctattgaaattttttctcctgaagaagaaaaaattgtcattagttttcttgattttatagaaaatcaaggaaatatattaaatcaaaacgattcagaaatttatgatgcaattctaaaaaacggtatagatctaggggttctactaaaccaattaattaaagcttacccaacaggtgaacaaaataaggttacttttctaggggaaggatttgatgctcagaatctatatgacacactacaatattacagtaatcaacattcagatagttttgaagaaaacttcaacaatgaatctactaagttactagataaaactattgaaaaagttatcactaatttggatgaagaatctattcctcttattctatattgtaacgaactagaaacaacaaaaatagtactaaattcggtttacgagaaaataaatgaattacacccagaactaaatgttgaatacttcaatgcctccgaatttgaagatattattacatcaaataaagatgatggaatttctcagaacgtttctgaaatttttgaaggaattgattttcttgtttttgagggtgtcgactccctcaaaactgaatttattggctaaaaaagaacttattaaactaacaaaatggttacaaaataaaggtcaacaggtcttattttctagtttcgtgaggccagaaaatatagaaatgtttataagtgaagacattatttcggatggacacattatcgatattactacgagagaggttgctgtatgattggaaaatggttaaaagagaaacgtgaaaatctatctttgactgctcaagatatcaagcaggaaacaaaaacatcatcaacacttatctcactagttgaaactgggaaacgacttccctcagaaaaattcctagagagttatcttttagttcttgctaaagctagtggttttgacgagactttacgggatcgctatacaacaactgagtgttttgagaaatggaaaagtaaacttaccattgaacataaaggaaaagatactatatattatagctgtggtcgaaaaatttgtgtggattctaaaggtttatatctaaagaacatcgaaccttatgatttgcatgtatatttcataggttatagttggagtgattttgctgattatcaaaatagttacttgaaacaggaactgaatattgatgtattaaaatcaacaccaaatcgtcttaataaaaaaattgatcttattgaaacattagatatagacgcagaagttacgcagtattggcttgagaaatacagagatgaactaaaaaaacttattgaggactcttttgatgagttacccaagtcttacgagaaaatatattattcacttacaaaatttggacttgaagaagaaataaagaaagagaattcaaatggaattgagatttcacaactctctcaacttaacttagttctagatggcgaacagttaacagatggggaattagaggcaattgccactgtaattgagggaatcagagctcgaagaagaaaataatcaaaaaaagatggaagttttagtttccatctttttacttttaaatcaattattctattttcccaacaactctcttctaacttctttacgtaagtcttcaagtgttgtgatgccgtacttgtccataacttcagggaggcggtcgatgattttagggcaggcatagggatctgcgaagttggctgttccgacaccgatggctgaggcaccagcgataaacatttcgatagccgcttcggcactgtcgacgccacccataccgatgattgggaggtctgatgctagagcaacttggcggataagcttaagggctacagggaagacggctgggcctgacatgccaccttgaccgttggcaatgataggtttacgagtggccaagtcatagcgtgttccgaccaaggtgttaatcatggtaaaacctgtcgcaccggcatcttcgactgctttagcgacacttgtaatatcagcgacgcttggagtcagtttgacatagacaggcacatcagagtgagagacactggcttttactgccgcataggcaagctctggaacttgtccgatgaggaggccgttattgccatggtccacgtttggacaggagatatttagctcgattgccttgacgttactggctttggaaatcttatgagagacttccgcatattcttcgtttgaaaatccagccacattggcaatgattggaagctcaggataatgctcctgcaaccaagggagtttttcagacaagacagcatcaacaccaggattttgcaagccaatagcattaagcatgcctgatggtgtttcggctacacggggtgtcggattaccaaaacgagggttggcagtcgttgccttaatcatgatagaacctagtttgtccaaatcatagtacttggcatactcttgaccaaaaccaaagcaacctgaggcagggataataggatttttcaagttgagccctggaaggctaatagctaaacgattatctgatttaatctctgacatggtaacctcctagacgatgacttttccggtagggaagactggtccttcttcgcaaacacgaagatttttggcgtccgactctcctttaacatgaaccacacaggcatagcaagcacccataccacaagccatgcgagcttccatagaaacataggcatgaggatgattttcaaacttgctgtcgacatatttaagcatgcctggggctccgcaactgtatacagcatctggagtccagtcgaaatcatcaataactgtcgaaacgtaacccttgataccgtatgaaccgtcatcggtcgtcacataaacatcaccacaagctttgagcttgtcctccaagatgacagcatccttattggcaaaaccaatgactgatacaacttcaactcccttagccttcaactgcttagccgtctcaaccaaaggtggcacaccaatacctccaccaacgaggagggctttctgcccagcctcaataacagaaatatcaaaaccatttccctgagggcccatggtatcaatggtttgaccagctaccatcttagacagaatagctgttccctcacgctccacacgatagacaatggttgcctctttcttgtcgtagtcaatttctgaaatggaaattggacgacgaaggagcttacttgggtctggtaccttgagatgaacgaactgaccaaccttcatatctgcaaccatctctcccttaagcaccatttcgaaaatacgaggtgcaatctcacgctgactcacaatggttaaatcttcaactaatatcatgacaaccctttctaaattgcaaaatatcatcaaaaaaacctcgccacatggcaaggtcgcacaaaaaatcacaggagaaccctgctgtttcactctgtccgaccttttaagcctctctggactcatttaaaggttattttgtcattattataacagttttcataacagatgtcaaaggagaaaagaaaaaaccaaagcttataacattaagctaaggtctctccagcctataactaggtcctctgtttgatacgttttcaatcatctcatagcggaacataacttgtcaacattcctaacaataggtgttagaatttttgagctagagtcttaaataagattatttaaacaatctgtcgtaaaccatggtatgagccaactgctgaccatagccacccaacagatcaaccaaggcataagcaaaggctaatgctgttccggcaccacgacttgtgacaatattgccatcaacaaccaccaaatcagtttgatgctcgccagatgcaatttgttcttcaacccctgggaaacatgtgaatttgcgaccttcaagaagaccagcacgttcgagaacaataggtgccgcacaaatggcagcaacatattttccggcttttgctgcctcttgaagtgagacaatcaaggcctgattgtcgcgtagattagttgagccaggcatacctccaggaagaaccaccaagtcgtaatccgcaaaattgccatcaaatacaccatccatagcgacttgaatcccatgtgagccagttactgacgcattttcaagtcctagcatgttacagtcaaatcctgctcggcggaagacatccactgggctcaaggcttcgatttcttcaaatccttccgcaaatactactgctacttttgtcatgatatacctccaattttcttatcacaagattctattacgccttaaattatagcagttttagaagcaggaaacaaaccataaaaatggctcttgagcatgaaaaaaagacagcacaaggactgtctttgtcatcttatctaattaaacttgctaggatccacaagagataaatatgggctgggtagaaaatatagaagaaattcttgttaccactaccacgctcaccattatagaaatacataggcatcgcagcaaaaaccatcatccattgcacacccgtcggatcaaagagatgggcaatcactgaaataacagctaaaacaatgatttgagcaatgcgattggtacggaaaatatagaatagcaaaccaaggataaccatcacaaagccaccctcaaccatgataatacttggcacaagtgacaagataaaggcaacaatctgcacaacgattgggtttgcatgtggcgtttcaaatatgcctgcaagaatcacaactggaatagacgaaagaatcggcaagagaaagacaccaatcccttgaatcaactccttgttcgatttatcgcgaagccccttagccaacaaatcccaagagcaaataaaaatcccagtgataaagaaggttgaaaaagcattgttggttaaaccgatactaccattatgaaaaatactaccaatgatggcgttgccaatgatcataaaccaactcatgtaaagcagacgcctgagaaaagccatacgatcatgagtgtagtgaaaactatcagcagcaagaaagaggaaaattgggaaagacagacgtcccaacatcgtcaaccatataggtgcccccatactcccgaacatctgatagatttggtccaaaaacataagtgcaacagctaggtatttcaaattagtcgcattgcatatctttttaatatcgttcatttaatgctcctttaattttcagcatattaaatgataccacaagtcagatataaattcaaaggtattcaggataatctaagccataacttttaactattttagcggaataatttttgtaataaagaatggttcataataataacaaactcaatttcgactacccatcccaagcatttttactctctttgtgctataatagttaggcaatatttacgttcataacgtatgcaaattatttaaaaataactaacaaagttcataaactcttcaagtttttgaaataacttttttgcgagcagagcgagcaattaactgagactttccgctgtgttaaaagcgcctgaaaccttctagtttcaggcgctcggaatttttgagacgttaggtaggctcaaaaattagtcatggaactttgtaaaagttcgctgacgtccgccaacacctaaggaaagtctcacagaaaattttatttttaaaataaaacaattattatcaataacaagaaaggaagtacatcatgtcttttgacggcttttttcttcatcatatgacggctgaattgcgtgagcaggtgctttacggacgtatccagaaggttaatcagccttttgagcgtgagttggtcctaaccattcgtaacaatcgtcagaattacaagcttctgctttcggctcatcctgtctttgggcgtattcagacgaccaaggctgacttgccaaatccgcagaatccaaacacctataccatgattatgaggaaataccttcagggagcggttatcgaggatatccagcaagtggaaaacgaccgtgtccttgaaatttctgtctctaacaaaaacgaaatcggtgacagcgttaaggttactcttattatggaaatcatggggaaacactccaacattatcctgattgacaagaacgagagcaaaatcattgagtctatcaagcatgttggtttctcacaaaatagttaccgtactattctgcctggatctacctatattgctcctcctaagacagacgctaagaatcctttcgacattccagacgaaaaactctttgagatcctacaaactgaggagttgtcagctagaaaccttcaaaaacttttccaaggtttggggcgtgacacggccaatgaattatcaaccttacttgagactgataaactcaagaatttccgtgccttcttcaatcgtgaagtagagccaaacttaacagctaaagcattttcagctgtaagattctctgatagtcaggaccaacctgagtttaaaaccttgtcagcccttttggactactactacttggacaaggcggcgcgtgaccgtgtggctcaacaagcgagtgatttgatccaccgtgtgcaaaatgaactggaaaaaaacaagaaaaagcttgttaaacaggaaaaagagcttgcggcgactgaaaatgctgaggagttccgtcaaaaaggggaacttttgaccacctacctcagcatggttccaaatgacaaggatagtgtcgagttagacaactactacactggtgaaaagattacgattcctctaaatgtggctctgactcctaaccaaaatgctcagcgttacttcaagaaataccagaaacttaaggaagctgttaagcacttgactggtttaattgaggaaaccaagcagactattgactatctggagagtgtggagttcagtctttctcaagccaacatggatgaaatcgaggatattcgtgaggagcttgttcaggctggatttatgaagcgtcgttcaactgacaagcgccacaaacgtaagaaacctgaacagtatctagcttctgatggcaagaccattatcatggttggtcgtaacaacctgcaaaatgaggagttgaccttcaagatggctaaaaaaggtgagctctggttccacgccaaggatattccagggagtcacgtggttatcaaggacaatcttaatccaaccgacgaggtcaaaactgatgcggctgaattggcagcctactattctaaggcacgtctgtcaaacttggttcaagtcgatatgattgatgttaagaaactcaataaaccaacggcaggtaagcctggatttgtaacttatacgggacaaaagaccttacgtgtcacaccgactgaagaaaaaattgatagtatgcggatgaagtaatctgctttataaaatcaaactctcttgttttagaaacgagagagtttttctatgtcttcattagatcaatttctttcgttgatgaatgggattttcttttagttttcattacatttttccgatgactgtgctaaactataagggtaattacctatattaaaggagactttcagcatgaaggctcttatgtcatatacgagttcttttttagaatggttagggcgctatgtggggctcttagtctttgggctattatttgtaactactttgttcattcgcacgaccatgatgacgggatactttgagtgggcagagattagtagcgttccttggtacgtttatgtttcaggtggggccattctgcttttgacccttctctggcctaaaatcttaaaggaactgacaacaaagcagattttcgtctttttttccgtttgctttgtgagttttggcctacttttgatttttctgaccagttttgctggtcgagacgatgcaggtactgtctttaaaggagcagtccagttcaatgctggcaacttctccttaataaaaccaggagcctacttctaccgctatccgcatcagttgggtttgcttagttttgaacgcttggttctctatctaattcctttaccagttatctctgttttctatgtattgaatcttggcatggtcattggtatgaactatgctacatggaaaatcacggatgaactatttacaaggcgtttagttagtcgtttggctgtcatcatgagctttggtttcttgcctctagtctttaacattatgtttgcctatggacttatgtatgggttgttcttttctagttttgctattctcttctttctacgttacttaagacgtggtaaggctaggaatgcgattctttcggtggtcatgctatctttggcctactgggtaaggagcaacaacatcattctcattattgctctatctggtattctaatactcttgacgcttagagaaaaacggtatcgctatttgcttttagtcttagctttctttgcctttcctatgagtttgcataaggcgacgaccagttactacgagattaccacccaccaaaaaattcctggaacacctcagattgcttggctggctatgggcttacaggacaaacccgattctaaacgcatgccaggatggtataccggctatgtccgtgatatttacgccaagaaaaagggcaatatcgaaaagattgaaaaaagtgccaatcacctttttgataagcgtgttcagtatctcctagcccatcctgatgaagccagttggtttttcagcaccaagtttgtcagctcttggacagaggggagtttccagtccatctggaatggcccaagtaaagacaagtttcagccactgtggaataggtttgcgacttccatctatcacgatgggaccctacatctctttttcgtaacctatatgcaaggctatctcctagtcctatatcttggtggtgtgttctactacgctttcacctataaacgaatgggtgatggagcaactataggactttatgcctttctctacctctttggtggtatcctcttccatctcatttcagagactaagagccagtataccctaccttatatttacttacagattccaatgattgcggcaggctataatcatatgacacaaatacttagccgctatctaaaaagtttgcgaaagtcatcttaggatggctttttgtcattgtttcacaattacaatcttgttataatagttctatgaaaaattcgtcagttgatcttttacgaggccctattttgcggtctcttttaatctttgccctaccaattctgatatccaatattttccagcaactctacaatactgcggatgtcatgattgtgggacgctttctaggtccagatgccttggctgctgtaggagcttcttctgctatttttgatttggttatcggatttgccttaggtgttggaaatggtatgggggttgttatcgcacgttactacggtgcccaagactatagaaaacttcgtcagtctgtggcggccacagttgtcatcggtctgggcttaagtgccttggttatgattctaggacattttgggctttatcctttgctaagatttttagggacacctgcttctatcattgggcagtcctaccagtatatttctatgattgtctcctgtgttggggtaactttgggttataatctgtgtgcaggtctccttagagcagttggtgatagtcttacagccctctatttcttgattttttcagctctagtcaatatcgttttagaccttttctttattacccaacttcatcttggggttcaatcagcaggcttggcaacgattatttctcaaggactttcggcgcttctctgtctttactatattaagaaaaaagtgaccttccttcttccaaacaagtcagactttgttctggattcaagtctttatttggatctttttggacaaggcatggctatggggctcatgaattccatcgtttctattggtactgtgaccttacagtatgccattaacggttttggtcctcttatcatcagtgctcaggtggcggcaagacggattatgtcctttgctgttctccctttgacttcacttgctgctggggtaacgaccttcacctctcagaacttcggggccaaacagtttaaacgcattgtcgctggtttaaagcagtccagtcttgtttctgtcatctggtctctcattgcctgtgctctcctctatgtagcaagtcctttcttggctggtcttatctctggttcagataatactgtgattattgacaatgccagtcgctacctccgtatcagttctctcttttatcctattttaggaatgctctttatctttagaaatagcctgcaaggtctaggtaagaaactgacacctttaacctctagtttcattgaacttttcggaaaaattctctttgttcttttggtcattccttctatgggctaccttggcgttatcctatgcgagcccttgatttggattccaatgaccattcagctctattttgccttaagaaaacatattaaacgcttgtttgtcagttaaacttttttgaacataaaaaaacgaccgtcatggtcgtttttagtttaatttaatccccattcatcagagatttgtctcataatagcttcttgggagacaatcccaaagcccagcatgtaagttgagtaatcagcatagatgaccttgttattttgaacagccttaaggctagtccagacaggggtatttttaagtttgttatctaggagttcttgagaatctgcttgaacaatcaggaggtccggattaatatcttttagtttatctggatcgataacttggaacatatcatctggattgaaggtttccgctcgattgaaatgataagtatcatagagataaccaaaatgcccgtaagcataataacggatgtcattgtcagtcacgcgaagatacatcagtttctggtcgccaaacttggctttaacattctccgcgaaaacggcctccctagcatccaatctatcgaggtccttcttcatctcatcacgtttatcaaagatttctgccaccttaagagaggtttcatgatagtcccaattttcatcggtgttgatttggtagccaacagtcggtgcaatttcagacagctcctcgtagaggtcttcctgctcgcctgtcataaggattaaatcaggttttaactcagcaatcttatccaaatctggattgccctgccaaccaactgaaaccactttggcatccttgtattgtttcttaaagagggttgaaaattcttgactatcagctcgaccagttgtcgcacctacaggagtgatatcgagaggatccaagatttcaccatagaggttgtcgaggataacgatacgtttaggagcttttttcaactctgtcgtaccaaaatcatggacaatcgttttctccttaaaagtctgacttgttttatttgactctgcattatgtccagacgtcatgtctggcaagtaatacagtaaaagaccagaaatgatggccaaaatggctagtaaataaagaagatttatttttttcatggcaactcctcgataagatcggattaaatcgttactttaaagttatctcaaaatttctttaatgtcaatcactacttgttagtttaagcaaagaatagttgattctgtaatattactgattttaataatagattattttgaatgttccataggtagagcaatattttggaaaattaatctatgttataatgataagtaacattggagggaaattatgttaaatcagctttcatttaagggacaatggcgacagtaccaacagcgtgttctcgataaagccgaaagctttatgtatgatggaaagattcacttggtggctgctcctggttctggtaaaacaaccttaggaattgaatttatacagcgttttggtaatccaactttagttttagttccgacagttaccatccgtcaacaatgggtagatcggattaaacgagcttttttaagtgatgacaatctagtagaacaactcatttcacaagatctaaaaaagccgaaagtcattacagtggcaacctaccaagctttacatagcgccatgaatcagggtgtgggtgagagtctcgttgaagatactgatgataatgctgaacaagagcatttcgattttcaagggttcgatgtccgaaaaacttttggggaccaagatttagggactctttgtctggatgaatgccatcatttaagaaatgaatggtggaagagtttagagagttttcaaaaagcttttccaaatataaagatgatttctttgacagcaacacccccatacgagggagaacctgcactttgggatcgttatattagcatgtgtggtgagattgatgaagaaattacagtgcctgaacttgttaaggaagggacgctctgtcctcaccaggactatgtctacttcgcctttccaacaaaggaagaacgtgcacaattggaccaatttgaaaagcagaaacttaactttctaactaaattgtctacagatataaacttttcgaacactattcagtctagcccagcactaagtggccaaattggcgatgatgacctattggctaatcctaaatacctttccgctaccctgattttcttacaatctaaagaattgccttttcctcaacgttttcaagaacttctctctgcaaaaaccttgccaacttttacgcttgagtggtttgaaaccttgcttaatggcgtgattttccaggtcccaaattggtatggatttaccgaggaagcctttaatcagctaaagagtgatttgaaagcaaatggtcttatcgagagaaatcaagttaaacttattcggaataagaagcaagatgtcctgcttaatcaatcattgggaaaactcaatgctgttagagatatttttaaggcagaataccagtctctaggaaataatctccgtcaacttgttttgacagactttatacgtaaggattttcaaattcatctaggcgataacagtgcacaatttacacaactaggtgtgctctcttactttgaatctattcgtagagaaataattgaacaatcttggacggtgcctgtggctgtattgacaggaagtttagtgattattccaacttcagctaaagaacatctagagcgactcatccctaattctcgtttatcctatgatcttattggacagttgagccaagaagactatcttaaggtgagtgtttctggttctcaccatgatctagtgactgcccttacccaacttttccaagaagggcatattcatgtgattattgggaccaagtctttattgggcgaaggttgggatgccccttgtgttaactctcttattttagctagttttgttggaagcttcatgctaagtaatcagatgcgaggccgtgccatccgtgtctggccagaaaatcctaataaaacgagtaatatctggcatttggtttctattaatttatcacctaggagatggtttgattttcaagatgaggaagaaaaatacgatgagacattagagctgcagttgtatgcacttagtcctgacttagatttgttagatcggcgtatgacacagtttctgggcctacattatcaagagcctactatcgaatctggcattgatcgccttgacctcaatcaaataacttttagccgaaagggcctagaaaaacttaatcaaaatgccattacactatctcaaaaacgtcaggagcttaaagaccgttggcaacaagccctgccactctacgaagatatggaagtggtcaaccaagttgaggttgacaaacaatttctaccgttggtataccttaatgattggatgaaggccttacttatttcccaagcccttgctgccacttattttatcattgatgtgacaagatactttattgttggaaagccgtttgttcatagtctaccaatacttctactcgctcttcttctactagctgtcttctggggaagatattttatctataagagcccctataaacgtttggaaatttttggtaaagctatccaccaagccctgctggattcaggtcagattgagactaaagagtctgctcctagagtggtaaaagatagtaaacaggcgatttataacgctatctatctcaagggtgctagcatgagagaaaaagaaattttttctcaggcgataactgaattttttgctcctatcgaaaatcaacgctatatcttaaagtcttgtcacaaggtgaaagatcaaaccgaattttttgccgttccaagtatgtttgaaaagcgtaaggcagatgcagagtctttcctccgacacatccaaaaaagtgtaggaaaatataacctcatttatacgcgaagtgttcaaggtcgtcctattcttctggaagctcgtatcaaagcgcttggaaataagcaagaacgtaccgttacacataaaaaagttatgtcaactttagaatgataaatagacctaaccacttaaaccgtttttatcatgttataataaaccaacgacactatattggagaattttatgacactcacacacatttttttcgaccttgatggtactctcgttgatagttctgagggaatccacaatggttttgttcaaacctttgaaagactaggcctccctgttcctagtgacaagaaaattcgcacctttatgggaccacctctcgaggtaacctttaaagaagagattagcgaagaaggtgctgaccaagctgtcaaaatttatcgtgactattatgagactaaaggacaattggaggctcacctctatgatggtataaaagaggttctcgagtaccttagtcaagatcctaacaagaaaatctatatcacgacttccaaaaatgagcctactgctctagaaatgtgcgagtaccttggcatcactgagttttttgacggcatctatggggccacacctgctgctttccacaaggctgacgtcttgcagcgtgctattgctgaaaataatgcgaataaggaccagtctgtcattgttggcgacaccaagtatgacatgattggcggaaaaacagttggtatcaagaccttggctgttacctggggatttgggacaaacgaaaccctcttggcagaaaatcctgattttgtagctgatactgtccaagaactctgggatattttgaataataattgatattaaaaaagagcataaccatacaagcatgctctttttgtcgctggtcaacagggacaatctcctgttgagttttttaattccctcaccatcgcttatcaaactaaatccctaatcggtcggttatgttaagatagaagtagctcatagtttttcctcggattctgtttgtgtggttacttacagtttacaccaatgaaacgctatgagttttttattgcacttatattgtatattcaagagataaaaaatcaccaacatacaatgtatgactacctcattacatataaaggataagacaaaggtggtaaaatgaaagcgtaattttatggtgatgtacgatttttgtgtaaaacattctacagtacaatgagaatattttggaaaatttgaactcaacaagtctgattttgtgttcgaaaggtggctattgttttttaatgtatagagtaacagtcattatgcaccatactcaatcacaattgtatcaaggtattgagagattttaaaagattttctttttttttacaagaaatcttgtgcaaaaaagacagatttctcaaaattttgaatctgtctttctttacttaatatactgttcgtgtatggacccgcccgtttggagcttcaaattcgtattctaagtaatcctgataggtccctggtgcaatcactccacgcacatctaatacagccgttcccgcctgtcccacaatggaatctgctaacaggcagcaattcgtagacagaacaaagtaagatttaaaacgcgaagaagtaaatttatatagctcagcccctaaatcatatttcaatttgtaagcgtaggtcggctgaccgtcttccagtaacctactaggtggatcccaaggttctaacaactgatcaatttcagctagacgcttctctactgcctgattctcttcttcggtaagggataggctgtagccaaacagcgtcttttgactctcttttttacatagttcgatgtatggttccttatccactttaaacagtacgccatccccaatcgtcccaaatagacgctctgaaaagggatcgtaacttccgtaagaaatgaccttcccctgataacaaatatctacatgcccaatcgctccaaataagttgctgtcagaagtatgaaccaaaatttctaattcccttgcctcttcttcttttttcaccaatcgataagggcctgtgtgtcccgccgagctccctttttgaagaaactggttaaaccgttttaactccttagcagggataaaggctgcaaagataaccggtaggctaatacgaaagcgacgttttaactcttggccttgttggtctttgtcaaataaaataccatctcgaatattagaaatccccaacaagaccagataagcccccaagaggataaattggaagtgcccatctgaaccaggttccaagacagttgctagaccaatcccaccgtttaaaagcgcatcccataaatagagccagcctccttttacccgattggccttataaagccaaaatgtgatcccatagacaatggcactccccaactgatatgcccctaaacaaatcacaactaagtttacgggcagactactcagtcgattcaaccagatcaacgcaagtgaaagaaaaataaaccaaatagagtggctataggaaatagacttgctacgtaacaaaaagcgaagaagaaagcttcctagtccatcaactaaaaagtaaatggctaatagatccaaggaaaattttgtgaaaccaacaccgtttcgaaaaatgaggatcccaaaaatgacggcaagaaccccaaacaataaagtccgtcttcttgcaacttcttcaacagataattttctcaccatgacaccctccttcagagatcaaaggtctttagacaaatactattttatcaagtataacagcagaaatcatctactagaatttttctcattagtcaatcacaatcatagatttaatagacttgcgttcatccatatctttataggcttgattaatatcttccaatttataacttgtcgtaaaaactcggcctggattgatatctccatccaatacagccttgagcaagagttgtttgttgtaggtagtaacagaggctggtccgccaccaatcgttgtattttgtccaaaggttgatccaatggcacgattttcataatgtggaacaccaacaaatcccatacgccccccattgtgaaggactccaagagcttggtccaccgctgcttcagtaccgacacattcgagagctgcatccgctcctccccctagaatttcacggactttggcaatgccttcctcaccacgttcagcaacaactgctgtcgcacctgactccaaagccatttgttggcggtcttcgtgacgactcataaggatgatttgtgaggcaccacgcatcttagctgcgatgacagcacattgaccgacagcaccatctccaataacgaccaccttgtcacccttttgcacattagcaacacgtgccgcatggtaacccgtcggcatgacatcagctagtgtcaaaagtgacttgagcatgccttcactataatctgaaggttgcccaggaattttgacaagggcccaattggcaaagtggaatcgaatatactcagcctgaacgccaccagaccagttattacctgggtggttgtcacatgacccatcaaagcccacacgacaggcatcacactgtccacaaccgtgtgtgaaaggggcaatgacaaagtcaccagctttcaccgtagtaacgtcatcaccaacttcttcgacaattccgatagcctcatgaccgctatttctgtgtccttcttccatttccggattgcggtaactccaaaggtccgatccacaaacgcaagtacggacaatacggataatggcatcatctgctgcctctagttgtgggcgatcaatttctgtcagaccaacttgtccagctttggtataaactgctgatttcatatcataacctctattctttcgtttctgatagtatacactttttaacaagaaatcgctcacatcaaacactccctattacggtcatatttagttacttaatcatatttttttccatacttcttttctagcattttcttgacaagataaggcattttgacattttcgcggcctttcttggcaattaacttcttcacaaaatctggcatttggatatcattctcttcttccaaaatctgacttgtacttgatggagcttccaactcatcaaaggtctccagctgaggttgatagtcactatagtcaccgtctatatgagactgaattgtcgaaagaagtgccttgattaaacgaggatcgctatttggcataggaggtctgtgataggctacacctagctcttggcaaagctctttacattccacatcattgtcaaaaagaacctcaatatgctcactaataaaagcaataggaacaaaaatatagtggtcagggtggtcactctcatctcgcagatattctaaaacatcaggcttaatccaaggaatacctatatcactctcactctgccaagtattggtgtactgctcttccctaagtcctaaattctccgcaatcaatcggctattgtcataaatctggtcgatataggggtcaccaaaatctagtgccaaaactgggacactgtgggctgaaaaaatcaccttatagctatcgtctccaatctgatctaaaatctttcggatttcatcagcccaatagtgaagtagagaaggttcgcggtaccagtccttgataatttggaacttaatttgatcactttctaaaaatttttcatagcccatgactgaatagtatgaataatggggctctagaatcaaacacaaacactcttcaattccgtcattctccatctctttaatcgcatcaatgatgaaaggtcgggaaaatttatttgcaaagttaaccgacacttgttctccaagagcggaagcaaccaagtcaacttctttttttgttatcctttggagcggcgttccaccgattcgtaggtaatggtcatataaggtctgaatttcatgtggttcgggacgaactccacgtcgtatatttgtgaaaaattctgctactccttcataggtaatctcttctggggacccaaaagtcatcatcaatacagctcttttactcataattactccttgttccacgttagttctattttatcatgaaaaggcttactttagttaacttagtatcaaaaaaactcctagagacaaactctaagagtttaaataacgtttcttaatgatgatgaccatttccttgattttgacccacttccaactcctcaatattacgtttatgggctcggtgggtggctaggtcttcatcaacctcaatggtaacgttttgaaaaccacaatctttgagcaaggtacgaatcgcttctttacaattctccatgtggttgacatgctctagacaaacatggacgatggcgtttttttccaggccatccatggtccaaagattaagctgattgatactagccacatagtccaactgctccaaatcactcttaacctgctggatatccactccttctggcacggcatctaggaaaatcctgagcgtactccaaaaacgtggaatggcttttgacagaataaagaaggaaatagcaagagataagagcggatccagaatataccagtcggtaaatcggaggacaatagccattagaatgacagccacccaacccagagtatcttccagaaaatgcaggctaagaatagattcattcttggtttgccctttgcgaatgacaagacttgccaatacattaatgctgactgcaatgattccaagccagagaatgccctcatcgttgacaggttgtggatgaaagagtttcgttatattttccaaaataactaaaacggaccctgtcatgagaatcactgccgttaccatggcccccaaaaggctaaagcgcttgtagcccaaggtatagtggctatcttcttcacgatttgaaatgctctccaaaaaggcagaaatcccaatagcaatcgcatctcccaaatcatggacggaatcagccaggactgcgctggatccaaaaatccctcctgcaataaactcaacaatggcatagcctaaattcaagaaaaaagccagccagaccgcatgttttgtcttcataatcctaaatcctctgatataatagattcatgaacatcatgttcattatcattatctaacattcacaacagaaaggataggggcaaaccgtttagggtgtacgttactgaacagtttgttcaaagtgtccatatgactgctcaggatcgtcgtattactaagactcgaaaagccatctataatgcttttttacacttactcaatcaaaaagactacgaggccatcacggttcaagaaatcattgacttagccgatgtggggcgttcgaccttttacagccattacgagagtaaggaactattgctagatgaactctgtcaaaagctctttcaccatctctttgagcgtgctgaacacctctcaccacaagactatctagctcatatctttcagcatttcaaaaaaaatcaagaccatgtaaccagtcttttgctctctaaaaacgattattttatccgtcagctacaaaaagaactagaacacgatgtctacccaatggtagccgacgaacttatcaagtcccatccaaccatccctcactcctacctcaaacacctggtcgtcagccatttcatcgaaaccctcagctggtggttgaaaaaaggcaagtcctacacggaacaagaagtgatccagttttatttggagattttaaaagtgggtactaactagaaaggcgtgtcttcaatgtccatcgtgcaattttattttgtatttccagccctattcatgcttcacgaactcgaagaaatcgtttggatgccatcctttgtcaaaaaaatatcaatccagtatccaaacaatcgaatcctatcttattacactccttttgctttcaactttattgtcttggagcaatttctcatccttatgacgtcgctatatcttagttaccagtttaacaactataccatttacgcaaccatcataatcgcttatatcttccatgtattcggacatctgattcagacaatcattattagaaaatatgtgcctggattgttgacgggaattctaacgagtttgtttactctatgcaatctcaaaaatgaatttccaatcatactttatggttactctctatttaccttattggttatcgttttaaatcttgtagtgtcatttatgattcttaataaaatcagtcataaaaaatagctctcagtcaattatagctaagaaaggaaacatctatgtcactttatctcatctttagcatcatcacagtcttcttagcccttacttttgtcctgcttcatcttgttgctgcactatcagctattctaaaaggcaaaaaaagcttaggaatcggatttattatcgttggtgccattgcttgtctctcagcccttcttcttgttatggttaatcgtaccttagcattttatatatggctatttgctagctcgacaatttgcgggggcgctctcctgaatggtcaaaataacaaaaacttcaacaaatcacaccaccaaattcgttttgtgattgacttgattattacttttttgctatatgtttggctatttctattccaataacatgtgattctcacttctataatacaatacaaaaaggcctagagtaccaatctaggtctttttaaggatttaggtaaacgtacattactatctttattctaaatgtgataagcatcgtcactagcttctacataagagaaataaactcaaaaagaggacccttctggatcctcttattaattgataaacataagtactaagctttcttagctgccttacttcattggtaccaaccaacgagactgttgataaggtaaatgaaaccaaaggttaaccaccaaagtatactaattgataggtacttgatccaacccactgcatccaatttacgagcaacaaattcctgctgttcttttttgaattgggcttgataaatccaaaccaagagaccaatcggctgcatgatggtgaaatagagtgttgtcaaaacctcaccgtagaagcctttttgaagggcaagcaaaagttaaatgacggaattgatcagaccaaagggatagttactggcacgaccttcagcttctcaaagagcagaaaaaaggttagtagggcttgagagatgaatcattttaaaggcaaacaattccaacaagacgtcatcattgtcgctgttggttattacctacgttacaatctgagctatcgtgaagttcaggaattgctttatgaccgtggaataaatgtttgtcacactacgatttatcggtgggttcaagaatacagtaaaatcctctatcatctctggaaaaagaaaaataaacagtccttctattcgtggaaaatggatgaaacctatatcaaaattaaggagcgttggcattatctctatcgagcgattgatgcggacggtttaacattggatatctggttacgaaagaaacgagatactcaggcggcgtatgctttcttaaagcgactccataaacaatttggacaacctagagtcatcttaacagataaagcaccctctataggatctgcatttagaaagttacagagaaacggattatacaccaaaacagaacatcgaactgtgaagtatctgaacaatttaatagaacaagatcataggccaattaagcgacggaataaattttatcaaagtctccggactgcctcatccacgattaaggggatggagaccattcgaggaatatataaaaagaaccgaagaaatggtatatgattatgaccatgaaacaaagtaaaatcaaaccgagtgatctgaggaagcacccgatgatcatgaaacaatattaaacacaaaagtcacccatgtgagttcttgccagaagctgaagttaatccttcaacctggaaaacccgcagaggtgactttctctatacatctcgatttttctggcaataatcattaaccgataaatatgtctgtgaatcacccagcgactccgctatgtccataatccgcggtggtagtaatcccactcgctggacaagttcgtgatcgctgaacaattcccgtggactgccggcgaagccaaacttcccgtgttccataacatacaccgactcaaattcagcggcgacccaatccatgtcatgggtgatggtcacaacttggtggcccgaatcagccaactgatggaaaattgcggtcaacttgcgccggctttcccaatcaagcgacatcatcggctcatcaaataaataaatcgccggatccactgccaaaactgtggcaacgctcaacagcttgcgttccgacaatgacaggtcatatggactttcagctgctttatcatccaagccaactctttttagagccgctaaagcccgcctcgtaatcgtgtcgtggtcatccatgacctgcgcgacactccactccacctctcgttgaacggacgggttgaaaagctgatcgtcaggattctgaaaagtaatcccaaccttcagtaacttttcgactggtttaagatcattaaaattttctccatcgatcttaatcacaccggtttgtggtgtcagcaagcccgtcaacaatttgaagagcgttgatttaccggcaccattttggccgacaatcgccaccatcggatcggcgaagtgtttgtcttcaacatccaagctaaaggaccgttccggataagtgaacgtcaggtggttcagttcaattgtggacataacaagcctccttcagatcagcgccattcaccggataccggccatcagccaagtgccaatccattttttgagcaagttgctggattgtcggggctggaatctgccagtcagctgccaaatgattaaacacctcacccggcctgccctgggctaccatttgaccctcgtgcagcacccacacaacgtcggcgacttcgcacaaatcgtcaatttcactggtgacaatgaagacagtcgtctctttgacttgggctagccattggaaaaattgccggcggccaaggggatccatctgactggtcggatcatccataatcaaaacagccggattagacacaattgccgtggcaattgccaaccgctggatctgaccaccggaaaggctctcgggacgcaaattcagctgttcaatcagccccatttgcgtggcaacttcttcaacccgtttttgaatcagtccttcagccattccctgattaatcaagtcaaaggcgatttcatcggcaaccgtgtctgccaacccgcttagttggccagctggattttgcagtacaactccattcatggcattataaacgggccaattgtcggacactcgctggccaaacatgtgccagtcgccctcaatctcagcagacacaattttgggaatgacccctgccagcacacggcacaaagtcgatttgccggagtggctattcccgataatcccaaccacctggccggtatgaacctccgcgttaatctgacgcagttgcggttgctcagtacccggataacgggtagtcaaattttcaattacaatccgtttatcttcgtccatatcttccacccaatcaataaaattgccaatccagtcagaccaatgtgcagcgtccgcgacaggcgatacacgcgctgggaggttctgacagtccggttgggattatcaaaacctctcagttggagcgaaatcgaccgcgccatcgattgatccaaggtcttaatcaccaatggaattagaaccggcaggactgactttaatttctgaatcaacgttttttgcggattggttccgcgaactttttgtgcctgctggattttccgcatattgcgcatcatttccggcaaaatataacacaccgacatcagaacgtagacggttttataagacaatccggacagttccaaataggccgcgttttctgaaatactcgtggtcaccataaaaaagccactggtcaaaataatcaccaatactcgacaacccagagtggtggcgtaaatcaggccttctttgtagaacgacaccccaagcacagaaaacagcacagtttgattccgactgtaaaataatccttggatgatcagcatggtgcaaatcagaaacaagctgaatcccagcgccttaaagatggtagaactcaatttggaaaataacaatagcagtgttgcgacaagaattaatccggcctgaagcaataaattcatactggtaaagctcaacaacgtcatgtccaagatgaacaagagcttagtaatcggatcgatcacctggtaccacttgagcttgacccgtggcgctccagaaatcaatgtttgatcagtcatcatttatcaccactaaagaagtgcaccatccgcttcggcagctgacgatagatgaagaatgccaggtaggccacgcagactttatccaaaatatccaagacaaactcatcggtaaatgaggccagccacactggtgcatgattggcgaccattaccgcaaacaatgagtcaccccaagcgataccggtctgaccaccccaaaagatgacgttgagtggcgttgaaatgacagctgaaacgaaggcaataataatagcagaaacaaatactcgtcgcgctgacgagaaccacccattggcgtgcaaaactccgacagcaatcccaattccgatgctggtaatcgcatacacggttgaaattggcgataaggtaagcccatagatcacgttgttgatgaaaccactgatggcaccggcaaccggcccagccaacatgctggcaagaaaggttcccaaagaccccagccaaacgggtaactttaacccctccgccaaggctttggcaacatagttaatccccacggcagcgggaatcaaagtcatggtggcagcacttaacttaaatttccacatactggtacgatgaatcggttctgttttcataatcttctccttttgtttttaaagagccgtgtcaggaatgactttcggacgcaacgctctatagaatagttattagaaccatatagtcactttaccataccatccgtagtcgacatgagttaatatagtaaaattactatttttaaaagttcatagtcttataatacgcttattttcaaaattgtcaagtcttttctgaaaattctttaaaaaatgttgtgaaatttaaaatgcctagctgagctagacatctttcgactgggattttgttttcattactgtcactaatacttctacgttttcgtaatcgacagaaatttagtccatgacataaatttctccacgactatagagggcagcctttcctgcaagataaatccgattgccctccaaacgacaaatgagaagtccactactctcagaagcttggtaggccctaaaatcttcttgtgccaacttattagcccacaaaggaatgacatgacagtgtcctgagccacagactggatcttccttgactgataattttggagcgaaacttcgtgtcacagtatcatacttgcttcctttggcagtgatattcaggaggagcccatctaaagcttttactttatcaaaatctggacttgcattaatgacatcattttcatgaggtaagacacagactagatctcttccaagccatgcttcaagcggatggacaccgattgcttcttccatctcacttgtgactgcaacctgttgcatggagtatgctggaaaattcagctcatagtactcatctttttttggtaactaaaagttccccactctgtgttgcaaaagttaaactttcaacatccttttcaataaatcgaaagagaacaaaggctgttgccaaggtagcatgaccacacaaatcgatttccccaccgggagtaaaccaacgtaattcatagtggtcaccatttttaaccgtaaaagctgtctctgaaagattattttctttagcaatattctgtaaagtatcatctgacaaccatttatctagaagacaaacagccgccgggttccctttgaaaacagaatctgtaaaagcatcgacgataaattgttggatggtatattgactcattgacatagacagctccttaaattgttaaccttgttttaaaactacaagtgagtgtagaaaatttagtaaataatcaaattaaattatttcttgtccatctacaccttaccccttaaaccactccatccctggagaatccagtataattttggtcaattgttgtgggctttcttgagtcccattgataatccagtcgacaataagtcctgtcaaaccagatacatacatggtaatagcatagcgctctggcatttgataagctgccacaatgactggtcgagaacgtggcgtagactcaatcatccccaagataaaagaacgaatgttgtctgcaaaacgaaagcttggattttttgcaatttcagcaaaaaaagcaccgttctcttggaaataagacaagatggcttctaaggcttctttaggataaaaggtttctttccttaaaatcatgcgaacagtcgacaaggtttcttcttttaattgctctaaaaaatcctgtttatctagatagtgcagataaaatgtcgagcggttaacacccgcttttttagttaactgactaatcgttatatcctctaaactttttgtagccaaaagctgaatgaaggcttctttaatatctgacttagttgtcgtttgtctctgttgcatacgaaccccttatttctacatattgttgattaaagtatatctagaattttgaaaatgtcaactatcatctggtattttaagttatgattatcatattttcttcgttatttcaacacattgttgttttctgttgtagcaatcgtattaaaaaaatcataaaataacgttcgtaattattcaacaggttgtcgttttagcagctgataatttttaaaggagacaaatacacatggcttatattgaaatgaaacatagttacaaacgttataaaacaggtgatgtagaaatcatcgcaaacaatgatatcacattcgagattgaaaaaggggagttagtgattatactcggttcttctggggcaggaaaatcaactgttctcaatattcttggtggtatggataccaacgatgaaggaaaagtcattatcgatgggaaggacatctccaattataatgcgaagcaattaacagcttatcgcagagacgatgtcggattcgtctttcaattctataacttggtctcaaacttaacggccaaagaaaatgtagagttggcttctgaaattgttgcggatgctaaagatgcggaacaaactttgattgatgttggtcttgggaaacgcatcaacaacttccctgcacaattgtctggtggtgaacaacaacgagtagctattgctcgcgccgtcgcaaaaagtcctaaaattctcctatgtgacgaacctacaggagccctggattacaatactggaaaacaggtcttgaagattctccaagataaggctcgcaatgaaggagctactgttatcattgtcactcacaatggagcgcttgctccgattgcagatcgtgtgattcgtatgcatgatgcgcgtgttcaaagtattgaactcaatgcaactccacaagatattgatagcctcgaatactagaaaggatatctcatgaatcgtaaaacttattggaaagatgtcagaaagtctttctctagttctaaaggacgggtggtttctattgcttcactcatggccttgggttctttcgctcttgtgggtctaaaggtgaccacccccgatatgcaacacacggcaacaagctatttcactaaacaccaaacagctgacctcacagttactggtagctatggacttaaccagtcggatcaagacctcttaaatcaagtctcatcagaggcaaacattgagtacggttactttaaagatgtcgttctgaaagattccactgatgcctttcgattattttcaaaaccaaaagatatctcaacttatgaggttgtaaaaggaaaacttccaagtaagcaaggtgaaattgctctttcttcagtctatcaagacaaatataagattggtgacaagatctcgttttctgaaaaagaaggtgacaatggtaaggatgtcttaaaagaacacacctttaccatcactggctttgttcagtcatctgaaatcttatcaagtgttgatctcggttcatctacagctggtagtggggaactcaaaggttatgcggttgtccctgaatctagttttgattccgacgtctacatgattgcacgcttagcttacaaagacgtcagtactgctaacccctatacccaggattacactgacaaggtttccaaacacgaggatgagctcgaaaaattagtaaaaaatcaacctgctaaccgtttgaaagaattaaaagctgatccacaggctgagattgaccaacaaacaagtcaacttcaaacggcagagactgaacttaacaagaaactagaacaagcaaaagcgagcggtcaggataagaatcctcttgtccagggacaattgacacaagcacaagatgaaatcgctgaaaagaaggagcaaataaaggaagctcaagaaaaactcgatagcattgctgaaccaagctacgatgtctacacacgtcgtgaagctccttggtcagaagggtacgtttcatatgagaccaacgcttctgtttttcagaacctcagtaatatcttccctgttatcctctattttattgctgccttggttacctttgtaacaatgggacgcttcgtcgaagaagaacggattaaggcagggacattcaaagctctcggttaccaaagcaaggacatcatccgtaaatttattatttatggatttgtgacgagtatgattggtactgctattggggttgctgcaggtcacattctccttccaactatcatatacaatagttataaagagcgaatcctcctcgcaccgattgagttacacttctatccgtttaagactcttctagcaattgtgcttggtcttttgtccacagttcttcctgcctttatggtagccaagcgcgaattaggtgaaaaaccagcccaacttcttcttccaaaacctccaacatctggttctaaaattcttctggagcgcatcaccccactttggaaccggatgaactttacacaaaaagtcactgcccgtaatattttccgctacaagcaacggatgttcatgactatttttggtgtctgcggttccatcgcacttctctttgctggactcggtattcgttcttctatcggagaccttaacacacgccaattccctaacatcattcgctatgatatgattgtcgcaaacaaggatcatctagatgagcaggaaaaggaaaacatccaaaaattaattaacgatagcaaggtcaaggaacatctttctattcattacgaaatgctttcaaaagaggcaggaactaataacgatcgtcaagatatcacaacccttgtggtcaaagacaaggatcaagaaactctacaacattacatcaagctcaataatagtgaaactggtcaaaaactcgaattgaccgacaaagggattattatttctgagaaattggcagacttagctggcgtttctgtaggagatgagttaaccgttcaaaatagtcaagacaaggatatcaaactcaaagttgctggtatttctgaaatgtatatgggtcacttcatctttatgaatcaaactacttacagaaatgcttttggtaaagaggcgagccaaaacgctactattctaacactgaagaatcactcagacaaaaacgttgagcaaacagccagtcaatttatggagcttgatggtgtcaaaggggttgttcaaaatactactctaaaggcacaaatcaagaccatcgtcaactcccttagccgtgttatggcagtattgattgggatttctgttcttcttgctttagttgttctctttaatttgacaaatatcaatgtggcagaacgtatccgtgagttatcaaccattaaggttctaggcttctttgacaaagaagtgacattctacatctatcgagaaaccatttatctctctatcattggtatctttgttggattcggacttggttggggattgcatcaatacatggtagaggttatccctcctgaaaatatcatgttcaatccaggtctgagctggctcatctatgctattccaacacttgtagttattgtcattctgacagatctcggtatctttgtgaaccaacaccttaagaaagtcaatatgctcgaagccctaaaatctgttgagtaacatacgatctaagctaataagttaagctaaagtacaaggacaacttccttgttctagacaaacgtcattttgggcgtttgtcttttttattttcgaaatgatttactttatcatctggtatttccatccaaaaatcagatttggagcaaaataaaaagggatattcgctatttatttcaccaatcttttgatattgaacaaggaggcacatacttttagataactcttatactccagtcatctatgtcatgtaaatacaatagtccagataacggcatgatggaatccttctttggcattctgaagtctgaggtgttttatggtcatgagaagacgtttaagtcaattgagcatttggaacaagctattgtagactgtattaattattacaacaacaaacgcattaagataaaactaaaaggacttagtcctgtgcaatacagaactaaatcctttgcttaaataaattgtctaactttaggttagtacaaaatccatttcttttgtggagtcaaaggactactgtcccaggctctttttatcgtaaccaactttgatctaactggcctttacttttgccaaaagctttcccatgttcatcaatgacagcatgaatctcttggcattgtttaagagtgaggccttccaaaacgttaccataaacagcatgcatttcattataggtatcaaagtttccaaatcctaagcgtcgaaagagtcttctcgcatattcatcagaaataaaaactggacgatcaaaaagataaagtaaaagtgcatctgcagtctctggtccaatcccttttaactcaaaaagttgcttccgtaactcttctgttccaatcttggacagaacctcaaaaccaccaacttctcttaaccagatcaaaagtcccctaatcgtttgagatttttgcttaaaaaatccggcaggtcgaatacgttcctgtaactcttctagcggtaaagccaggataccctctactgtcatgacatccattagaccagctaaagccaacttagcattcttctctgttgttcgctggatcagaatggtcgataccaaatcttcaatcttgttatccgattgccaccaattttgttctccatagtgcttgcagagtcgcaaaagagtttcttgtatttcttcttgcttaatcatttcttcaatagtccttgttttaccaaaaactcacgtgcgactttagcagcaggttttccttctactcccacttggtagttcatctgactcatttggctctctttgattttgccagccaacttgttcagaatgccttccaattctggatgtttcttaagaagagcttctttcatgaggggtgctccttggtaaggtgggaagaggtgttggtcatcctctagaacaactaaatgatattgagcaatttctgggtctgttgaataggcatctgttatttgaatattgccttgttggattgcctcatagcgaagtgccggctccatggtagccacattaagatttagtccataaactgattgaagtcctttgtttccgtcctcacggtcgttaaattccaacgtgaaaccagctttgagcttgtcctgaactttcttgagatcagaaatcgtcttcagattatactctttcgcaatacttttcggaacagcaatcgcataggtgttttgataagccatcggtttgagcaaagctagattatcttgtttctttataccatcacgcgcaacctcgaaaacttctttggagtcgttgctgactttaggagcaggttgcaagagagagcttgtaatggtccctgtaaattctggatagatatcgatatcaccctttttaagcgcttgataaaggaaatctgtcttcccaaagttaggcttaaccgtcaccgtcatgtcactattctcctcaatgagaagcttatacatattcatgagaatctctggctcaggtcccaatttaccggctatgactagattttctttctctttctgaggcatcatgcttggtgcgtaacttgctcccaaaccaagcaacataatagcgaaagctgcaaaaatcgtgcgtaacttggccttttccatccattttagaacaatattgaataaaatagcaagaagcgctgatgaaatggccccaatcagaatcaagctataatttcttcgatcaatacctagaaggataaaggaaccaagtcctccagccccaatcaaggctgccaaggttgctgtccctataatcatcaccgcagaagttcttacccctgacatcaccacaggcatagccagtggaatctcaaacttcttaaggcgctcccacttggtcatcccaaaggcaatcccagcttcttctaaactagggtcaatcccacgcaatcctgtaatggtattttgcaaaattggatatatcgcataaatgactagagctgttaaagtaggtagcgttccaattcccataatagggataaagagtcctagaagggccatggaagggatggtttgaaagacaccagcgagttgcaagacccagttactcgcacgttcacgcgtgctaagataaattgccaaaggaattgagaggaaaattgcaataattaaggtcaaaagagacaattgtaagtgctgtccgagagccgttaaccagtccccaaaacgttcttgaaaagttgaaatcaaattagacatgaaggctacctccaaacaagtttgctacaaattctgtcgcaggcgcttgtaaaattgtttcaggttctgccacctggcgaatttctccatcctgcaaaactgcaattcgatcccctaattttaaggcctcgtccgtatcatgggttacgaagatggtcgtcatgccgaattctttatgtaaatcttttgtaagagcctgcaactgctttcgagagatggcatccaaagctgaaaaaggttcgtccatcaatagaatctttggttccccaatgatagctcgcacaatgccaatccgttgttgctctccaccagataattcactaggcatgcgttttgcatactctgcagcaggcaggccaaccttatccaagagttcttctgttttagaagcaatttgttctttagtccagcccttcatctcaggaatgagagcaatattttccgcaactgtcaagttaggaaatagggcaatggcttgaaggacatagccggtgctgagacgtaactctcgttcatcatagtccttaatgcgttttccatccatatagatattgccatctgtcggctccaagagacggttaatcatcttgaccatggtggtcttaccagatcctgaaggtcccacaagaaccataaattctccattttcaatgcggagattgacatcttttaaaatgtccttttccgtgtagcgcagcactacatttttgtattcaatcatgttcttcctcaataagttttctatctctaagaatatccaataggctgcttgctggatgccctaagactttttcgacatctgttgaaaccccagcttgttccccaactttgatagctgtataggtgctgacccaagcatcgtactcccagttttgtgctggccattttttccgtgactcataggcctcttctaccgattcgtctacatacgtgatggcattaccggtctcttttgagagaagctctacgatttcttccatagaaagatcctctggccctgtcaaattcaaggtttgattttcccactccttaggatttaaaagaatttctgcggcaaccgtagatgtgtccttacggtcaacagctgacacaaggccactgccggccggaccacgaatttctccattttcaagtgcaatatcaatcaagaaatccaaataaaaattatctcttagaaaagtatatgtgaaccctaactccttgatataggcttccgtctgggcatgatctcgagacaaggtaaaagttgccttctcatctgccccataaaaggaggtataaacgatatgttgcactccagcaagctttgcggcatctaaaaaactcttgtgttcctcaacacgctctggattttcccgagcagagaccatcaataagacatcgattccctttaaggcctcaaccacctctggagtattggcatacaccatcttacggatttccgcagacgcgtagacttttgcacgctcaggactacgtgctaaatggattgaagcgattccctttttatcaataagatcagccacataggaacctaatttccctgttacacctgtaattccgatcataactgttacttcctttccctacatatcaatttctttagcttttagatttgagattatacgctcttgataagcttggaattctcggatttctttatcagaaaatccttggtaaaaaatctcacctaattctttgctgacacggtctccaatttctttttgcgcccaaccgaggtccgtcaaagagatatattttttccttttatcctgcgtgcaaggttgaatcgtgaccaagctttgttcttccaatttcttaaccatactggtcaatgtattattggctagacccgtcgcaagagcgatatctgtcgcagtagcgcaccccaactcttgcttccacaaaatcgttaaaattttcccttgttcacttctgtattgggcatccggttccttgctcaaaagtttttgaaaaagtcgcccattcaacaaacgaatctgtagagcttggtagccccctaacatcttgtccattttgtctcctttttgttccatatcgaactttatagtacgaattgtaacacctttcattacatctgtcaactatctcgatatagaagtaacttcaaaaaacaaaaaacttccctaattatctaggaaagtcctttctatgatttttaatgtcttaaaaaattttattcagccttagtaatatcttcacgcatctcatcgacattgaatttagcaaaaagatactgacggtcttgaactgggaaacgttggtcgagttggtcaactggaccgacttcgataataccattttcaataacaaagtccataacgtgaccaccgaatgtcaagtcgtctgaaataaaatggaggtgatacccagcaacactcacaccgtggaacatctctggggtccaaataccaacgatagtacctgaaatattatctacctcgtactcaggttggcgtgtggcaacatccgcaaacttaatatcggcatttgattttggaatcatgcgcacgtgcatatgtttaaaatgacctttgattttgatagaacggaaaagattgaccccatcataataagattcaatacgatcctcaagttctttatcagtcatttcataacgttgacggaagataacttcagcttggtgaggtacgactgctgcataaggtactttttcatcaggagaaacctctaccacttcgaccttaccctcagaccctttggcttgataggctttaccgtcaagaacaatcaattcaccatcgatagaatctaatgtaccgagacccaagtctccatgctccaacaattctccaactgttaaagtacctccataaagcccagccatcaaggctcccaaagtattatattgaaataattttatggcttcagacatgtctacaccctctttttagtaaaattcatctggcaaaatagtttcgccgagtttaatattatctttatagtcgattggaacatcaataaggactggtccatctacagcttgagccaaagcttcttgaagcaagctagcaaactcttctttacttgttgcacgataacctttcgctccaaagctctcagcatattttacaaaatctacagggccaaagtcaaccccagatgaacgaccgtacttcatttcttcctggaattccaccatattgtaatggccatcgttccagataatatgaacaattggcaatttcaaacgaactgctgtttccaattcttgtgctgagaagaggaaaccaccgtcaccagaaacagaaatgacttttgtcttaggacgaaccaaagctgcagagatggcccacggaagagcaacccctaaagtttgcatcccatttgagaaaagcaaatgacgtggttcataagatttgaaatagcgagccatccaaatatagtgactaccaacgtcaacggtgactgtcatatcatctttggtttggtcttgcaaaacttcaatcaaatctagcggatgtacttttccttcttcaggtcggcgatcaaacttaacatcctcaacaacgttattcttcaaccctttaaggtattcaactgatccttcaggtaatttataaccctgaatagctggcaagagcaaatctaaagttgcttcaacattaccaatcaactcacgttctggctggaagtaagtatccacctcagcaggttcaacgtcaatgacaatgatacgggctgaaatttcagcattccagttacgtgcttcatattcgattgggtcataaccaatggcaataatcaagtcagacttcttaagcaacatgtcccccggttggttacggaaaagacccacacgaccaaagaaagtatcttcttcaaggtcacgtgacacgataccagcaccttggaaagtttcaacaactggtaatttgacatgcttcaaaatctggcgaatagagtaagtgacagcttctgatgaagcaccattccccaaaagaaagactggcaatacggcatttttaatcgcttgtgcgagatagttaatatcagaaacagatgctgaaccaagttttggatctgtcataggcttaatagccttaacactgaccggagcatcagtcacgtcttgaggaattgaaataaagcttgcacctggtttccctgacttagcgtgacgataggcatttgctaccgtttcagaaagggtgttagcatcatgtacttcagcagcatacttggtaattggttcaagcatggcaacgttattcattgattggtgggcacgtttcaagagatctgcacgcttaacctgaccaccaatggcaagaacagggtctccttcatctgtcgcagttaccaaaccagtagccaaattagagacacctggaccagatgttaccaatactacaccaggtttccctgtaatacgtccaacaccttgagccataaaagcagcattttgctcatgacgggcaacaatcaattcaggtcccttatcttccaaggtatcaaaaaccctatcgatttttgcacctggaatcccaaagacataatcaacatcatggttgatcaaactatcaaccactaaatccgcaccatacaattgcttttcttctgacatgaacacagtccttctggccctaaaatcatagagccaactttcctttcaagtataagtcacaaagtgtcaaagtctgctcgttttttcacaaactttcgtcacttcacaattctgttatcattatagcacagttttcagacaatcttgtgaaaaaaagattgtgaaattttgaacttctggtacaaaaagaaacacctgattgctatcagatgtttatgtattttttaccttagcaaactctcgattaagataattttgcaggccttcaaaaatctctagtaactggagataattagacaaacttgagcgaccagggatatcaactacatccaaagaaatgcgttccaagtccttttcgtaaagaatacggaaggataccactgcttggtcagaaaaataattttcccctgccataatgtagcactcatagatgatgccaacaggattcgcaaccttcaactcaatacgaactgcgcctaatcctaaggcctccacttgctgaaaacgttccagaatagtctgtcgctgactaggaataaaactcgtgatatccatagtggccctcccaacattcctttttatctattatagcctaaagccgagaaaaaagcttgtgtagggtttgtagaagccacatagacattcaagaatacttagtcgccccctttgtagtctctaaagtctgacttaatactggaatcataatcatgtttatccacccaatcctttatatcagcaaaagaatggatatctttcttaataccagcactatcctctacagaaactacaattgtatcttctccatttgttcccaaccaatgtaagatatcatttgtttgctcttcaggagaaaaatagatttgtgattgtctttcgtactctctatctctataagactcatattgaactaattgctttttataggcattatattccctatcgtaatccttttgaactttttgacgtgctttttcgtaagctcgatagtctttctgatagtcttgttgagcctttttgttaagaatctcactgaaacttaaagttttaacaggaaaaatagaatcaggaaaaacatttaattctgaaactttctttggttcacttggtttatcaggtcctttccttttcaatggctcagttggaccagctgagaaatctccctccttgccttgacgggtcaatactttaaatttctttattgtattactatttgttggtgtctgatttacaactacttggtaaatatgcttgactccaggattgtcattaaatagattaatctgactctcctctttggaaatgtctacattatcaatttctatgataaggtttagctgagcagataaatagccgtcctttggggccggtgacttccttaaaagttcatccaagtttccttctctctttaaatacccccacatggtgctatcattcatctgattacgagcagaactcttatcaccaaaataaagcagttcatccttactgtatgaataatctggtaaattactagttaaaaattgatttgtatctaaattgtaagcgaattgcttgtcgcttcgagtatttctcaagaaaacataatcataaccatcaatcgttcttaaagacacagtcaattctttgatttccttaaaatccttgactttcttcaaatatggagttagattaataattttctttttaaaatctttgttaacatcataaactaccaaatgagcttgatgcagactactcatggtatcgtaatagcgaacaaaatggtttctaccaatcaactcagtcgctacgttatcttcagaattataaaaagtgggttcttcctgactaatggcaacatactgatggcgactaccgaaaatctcattgtcagttaccttatccgcttttagagcagtctgtaattcctctacagctttttcatgaaatttatgtttgacataagcatttcctaaaaagaaaagtgtgagtaaagtcgcagtataaatccttccacgcttcgagaagggaaatcttaaaatcttctttatcataacttttttacaaaaatagccagaacatcacattctgactattacttttatttctcatcttcgtccattgaaagcactgacaagaaggcttcttgtgggacttcaaccgaaccgatggatttcatacgtttcttaccggctttttgtttttcgaggagtttacgtttacgtgaaacgtcaccaccgtaacacttagccaagacgtttttacgaagggctttgatatctgtacgggcaacgattttttgaccgatagccgcttggattggcacttcgaattgttgacgtggaatgattttcttaagtttatcaacgataagttttccacgctcgtaggcaaattccttgtgaacaatgaagctaagggcatcgaccttgtcaccattaaggagaatatccattttcaccaattgtgaacgacggtattctgacaattcatagtcaaagcttgcataaccacgtgtagatgatttcaatttatcaaagaaatcaaagacaatttcagcaagtggaatttgatagataacgttcacacgattatcatcgatatattccatggtttcaaaatcaccacgttttcgttgtgccaactccataaccgcaccaacatattcttgaggaaccatgatttgagctttaacataaggttcttcaatagcatcaattcgtgtaggatctgggaattcagatgggttagacacttcaagcatctcaccgtcagtagtattaacatggtaaactaccgatggtgctgtcataatgaggtcgatgttaaactcacgttccaaacgttcttggataacatccatgtgaagaagacccaagaaaccacaacggaaaccaaaaccaagggcttgagacgtttcaggctcaaattgaagactggcatcgttcaactgaagtttttcaagggcttcacgcaagtcgttatatttatttgactcaattgggtaaagacctgcaaacaccattgggttcatttgcttatagccatggagcggctctgcagctggattgtctgcaagtgttacggtatcaccgacacgagtatccgcaacagtcttaattgaggctgcaatataaccaacatcacctgtcgcaagataatcacgtccaacagctttaggtgtgaagatacccacctcagtaacatcaaaggtcttaccattagacatcatttgaatcttatcgccaggtttaaccattccgttaaccaccctcacttggaggataaccccacggtaggcatcgtaaacagagtcaaagataagggcttggagaggggcttcaacatcaccttgaggtgcaggcactttctcaacgatttgttcgagaatctcttcgataccaataccggccttagctgatgcaagcacagcttcagaagcatctagtccgatgacatcttcaacctctgtacgcacacgttcaggatctgcagctggaaggtcaattttattgataactggtaagatttccaagtcattatctagtgccaagtaaacattggcaagtgtttgcgcttcaattccttgagctgcatctaccaccaagatagcaccctcacaggcagcaagagaacgtgacacctcataagtaaagtccacgtgtcccggggtgtcgataaggtggaaaatgtatgtttcaccatctttagctgtatagttaagctcaatggcatttagtttaatagtgattccacgttcacgctcaaggtccatgctatcaaggagttgcgcctgcatctcacgacttgacactgtttcagtcttttccaaaatacggtcagcaagggttgatttcccatggtcaatatgggcaataatagagaagttacgaatcttctcctgtcgttgttttaattcttcaatatttggcatttttatctttcctagttcttacttgtgattataaaaaaactaatcgttaccttctattatacaaaaaagacaggcttttgcctatctctaatatctgctttctgactgcatttagtccttcttatttcttaaaagtatcgttgtagtgcttattaataattgctgagcgcttgttttctgttgaaccacttgaaaatggccccaacccacaggctagtacaacaactcctaatagaataaggcaataaaatggatgctcaacaatatagtgtaaaatgtctgacataggaaggctcctctcaaatcataattaattacgattatattatcagaaatattatgttttatcaagcaaaaaagagagcctttcgctctccctttcaatcttaatggaattgcataccaccatcaacgatgatagtttgacctgtgatgtagtttgagtcaggtccagcaaggaagctaactgctgctgctacgtcttcaggttcagacaaacgtttgagggtaatatctttagcaaaagtttgcataccccattcatcatctttaccagcatttttaccaacttcgtgggcaatgtcaaacatcattggagtcttaacgatacctggtgcataagcattgacagtgatgcctgaatcagccaaatcacgcgccaaagtttgagtaataccacgcactgcaaatttagtaccaccatatacagtcaagttagggttaccaacgacaccagcctgagatgttgcattgatgattttaccaccatgaccgagtgctttaaattgtgcttgtgcagcttgagcaccccaaataacaccaccgacattgatgttaaatgtacgttggaactgttcttcagtaattgtatcaagaggtgttgttggagccacaccggcattattaacaacaacattcaaatcgccaaagtgatcaacaactttttggaaagcagctgctacttcagcttgtttagatacatcagctacaactgcaaatgctttatctgctgacaattcagcaaccgctttttctgcagtttcagcattgtagtccaatactccgactttaaaaccatcttcaaccaaacgttttgcaatcgcaaaaccaataccttgacctgcacctgtaacaatagcaacttttgacatacgaaatcctcctctaccaattagagtcactagcttaataagaagccttatctcaattggaatacgctaagttagtcaagttctggcaaagtcatttttcataggctttgtcttaactcaattaaaattctacccctttatgaaaacgttgtcaagtaattatcaaacttttctgaaaacaaataagaccaccttgaggtgaccttatttctattattcttcaaattcaaaacctattgcttccatatcgtccaagccacctagattagtcaccttagtatagcctctctctttaaggaccgatgcagcaaattctgcacgaggccccattttacaatagaggtaaatgaaagcgtctttttcagctggaatgtcagcagagaaaaactgggtatgaggtattaagagggcatccttaacatgtccttctgcatactcttctggactcctgacatcaattaacagtccacccttggctagatctgactgaatttgtgctaaatccatcctactcaccaaaccaaatcttaatttctcgagccgcagattcttctgaatcagagccatgaacgatatttggaatcatgtcaccatctggtgcggttgcaaagtctccacgaatcgttccaggagcagcatcgcctggattggttgctcccatcatatcacgccatgacttgataacacctggaccagaaataataccaatcactgatggaccactcatcataaattctgcaatgctagggaaaaaaggtttatcaaccaattgagcataatgctctttaagacgttcttcatcaagcatcagcatttccatacgttcaataataaaaccacggcgttcaatacgatcaatcacttgtcccattaagtgtcgtttaacagcatctggtttaataataaagaatgttttttgcatattctcaaccttaattgttttcttttcattttaccataacaagtatcattttgcagaacaaaaccttgtatagccttaaactataccctgagaaagaaaataactattttcaattgaaataaataaaaagtattatagatataaaatcttattttgaggtaaatcttatgacaaaatctaaatttcaattagttggttctcttcttcgtcctgctaatcttcgtaaatacaaggatgaaattgagcaccgtgacgacatccagtatcctttctacgatgcgcttccaggctatcaagagactgaaactgcagaaattaagcaaatcgtggctgaccaaaaatctaacggtattgatattcttactgatggtgagtttgggcgttctatgtggcacttggactttgtctggggtctcaaaggtattgaacgttacatcgctgagaatggctatacgtttaaagaccacgacggcggacaatatgagactcgtaaagatattggtattcgtatcaccgaaccactctcaggtaaaaaccaccattatctagatatctacaaattggttaaggctgaagctggtgatgaagatactaagcaaactatctggggcccggctcatgcttatactgaacttgctatctttgaccgtttggctggtcctggtcaagtatatgaaacaaacgaagacctcaaaaaaggtttgattaatgcctataaagaattcttggaagaatacaaggctgtaggtggaaaaattgttcaatttgacgactgtctctgggaactctttgacccatcaaaccctgcaagtttctttgcggaaggtaattctgatttggcagaattggctgatgagtttgtagcaatcaataatgaagttgtagactatgctcacgaacttggtttaacggtttggacacacaactgtcgtggtaactatgaaagccgttctgctgccgaaggaacttatgaagccatcgctaagaagttcttggcagagcaacactatgaccgtttcttccttgaatgggacagcgataccgctggtgacatcaaggctctcgaagctcttaaagatagcaaggctgaagttgtacttggacttctatcttctaaaacaactgagctcgacgacgaagaacgtgttcttgacttgcttgaaaaagctagtcaaatccttcctaaagagcgtctcttcctctctcaccaatgtggtttcgcttcatgtgactcaggtaatgagctggcaacaccacaacaatgggctaaaattaaacaaggtcaagatatcgccaagaaattctttggttaattgaatacaattagatttgaaaaatcccttaccgaattcggtaagggattttgatattgtctaagcttgaataaaaggttgtaaatccttaagagcacgctcagcaattttttcgtaacgttctttcttatcacgaatacgtggcccttccaactctttgataataccgaagttaacattcattggttggaaatgtttactttcagcgtgagtcacatagtagggaaggctaccgatagctgttgtgtgagggaagaggacttcttcttcacccttaaagagacgggcagcattgattccagcaaccaaacctgaagcagctgattcaacataaccttcaacaccggtcatttgccctgcaaagaacaaattagggtttgattttgattggaaggtttgttttaacaaatttggcgaatccatgtaagagttacggtgcataaccccataacgtacaaattcagcattttcaagtcctggaatcatttggaagacacgcttttgctctccccatttgaggtgagtttggaaaccaacaatattatagagactaccagccgcattgtcctgacgaagctgaacaaccgcataaggtgtcttgaaatcgccgtcacgtggacctttgtaatcatcaggatactccaaaccaactggtttcatagggccatagagcattgtcttgataccacgtttagccatgacctcgataggcatacacccttcgaaatacttttctttttcgaaagaattcaaaggagcttcttcagctgttgtcaaagcctcatggaaagccatgaactcttccttagtcattggacagtttagataagctgcctcacccttgtcatagcgtgacttaaggtaaaccttgttcatgtcgatagtcgctttatcaacgattggtgcagcggcatcatagaaatagaagccatctccaccgtttagttcatgaattttttcagctaaagcatcagaagtcaatggtcctgaagcaataactgtaatggcatcatcaggaatttctgtgatttcttcacggataacttcaattaatggatgattttcaatttcagctgtcactgcttctgcataaccttcacggtccaccgccatggcaccaccagctggcacacggtgagcttctccattacgcataatgatagagtccaagcgacgcatttcttctttaagaagccctacagcattggtcaagctatctccacggaaagagttagaacaaaccaattctgcaaaatttgttgtcttatgctgtggtgttgctttgaccccacgcatttcataaagttttactggaataccacgtttggcaatctgataagcagcctcggatccggccaaaccagctccaatcacgttaatataatctgcttttgattgagacatgacactaatacctcttcgggaacaagataaaatcctgcccccacaaatctttcttcatttttactcttagtagtatagcaaaaaactcctcatctggcgactaggagtcatctgtatttaaaggggtaaaatgatagtcactctagcaccacctgtgccattgtcatttgaaagagaaagactaccgtggtgtaagcgaataatatcattagcaatagtcagaccaagtccactatgattgcggctctgtctacttttatcctcttgataaaagagctgagtggccttttcaagtgattcaagggaaaatcctggaccagaatcaaggcagataaacttgaattcatcactttctaccctagaagttaagagcaactgactaccactaggcgtatgctctaccgcattcgaaacgatattcataaaagctcgatttaacaaggacctgtcccaattacctataatttcatcctcaatttctttcttgtcaaataccacattgatttgtttcgtttgtactaatgacaaggtttgatcgtaaatgtcttcaacaaattccttaactggaatttcttcaagcgtcaaagttttcttcaaactcgttttgttgagttcagacaactctttcacataagcatcaacctgttcaatccctttttgaaaatgctctaacaaatccatctgttccgcatccaaggaggtcatagctaagagttctgcattcccacgggcgactgtcagcggtgtctttaaatcatgtgtcaaagcagagatctgattttgtttatcttgctctgccttccaattttccatcaaagactcacgaagtgctactcgcatatgatccaaaccatttaaaacctggttaaactcagtaattttagatttggacgtttgaaaatccaagtcttgctctgctattttctctgttgccttcaatattggtctcaactctcgactcaatttactagcatagtaaaaagttaaagtaataaatatgagtagtatagacaccatcattgagccaatcatcaatagattagcattaggcaaatgctggttcatccactcattacgataccgaggtgatagttgataattgacaatgactatcccatctgaccgttcaaatgactgaaaatagccatatttaccaccatgagcattcttgaattggtaatctagcaaggattcttcttgcaagttaactggcatgttagacttcttaagcttaaaatccctagtcaagaagacatagcttgtaccatcaggcaagacatctggattaaagaccttagaagtttcaatttcattcctgacggcagacaaatcactttctacctgatttgctggaaacacaacgccaaaacgataagacaagctgaacaaagacaaaataagcaggctactgattgctgatagaactgtaagactgacgacataagataataagattgttcttagagagtgttctcgttttttaattagtgccacttgtaaccaatcccccagactgtttcaataggattttgcccaacatttttgagctttgcacggatatttttgatatgttcagccactgctgtcggactccctttatcctcatagccgtacaaatgcgtgtagatttgctctttggaaaagacttggcccttattttcagccaggaactgacaaatacgatattctgacctagtcaaatctaacaactgattctcaacataaagctcctgagcagacaaatcaaactgaatattttcaattaatagcttatggtggcgctcacgatgttcacgtctcaagtgagcagccacacgcgcttgaagttctttaaccccaaatggcttacaaatataatcatctgcaccataagtcaacccctggacaatatctgcctcttgtgttttagctgtaataaagagtataggacaatccacctgatcacgaatctcatgacaaaactggagaccatcaacatcaggcatcatgatatccagtaaaatcaagtcaaaccgtggcaacgagttcttatccaaatccaaaacacttgtaagccctgtaaccttatgattttggagctctaaagcctttacaaccaattgaacaatatcttcctgatcatcaataacaagtatctgagccataacctttcctttcgtacaaagttacccttatcatatcatctatacaagagaactgacaaggcgtaaagtagataaatatgagtagggtaaaagacatagaacaaatattttgaccctttacctctttgaccgttataacaaagcattaagggagctgcaaatatttccatccattcaatgtatctaaacattaaatcctgaaatgaaggtctacttagaacaatccccatcagtacccaaacaagactaacagtcacaaaagcaagcacttctttcttaagattcttgtgacaaagatacatagcgataccagtcaaaagcaaccatgttcctccatcgctaatagatgtatgagttggcaacactgtgtaattaagtaaatttatgaataaagtaaagattggtttgtcttgacctgacagatacaaaagtagcattaaccatggaagcattaatggaaaaagtaaggttggaattccttttagatatttcttttcttgaatccaagcaatgccttgaagagcaacgagcaagatagcaaacgatgatagcatcatattttttggaaagaaaccatctggccttacaagaggatgtaaaaaattataaaatccaaattgaattaatcccatcaaaatcgctaaaacatatatttttaggaagtatttctttcggtttcgggtatgaataaaaccctcaatcacagaaaatagaaacaagggggccgctaatctcccaatcatagcaaaccaaatgggtattttcccagtatagtcaaaaaaataatgaatatggtcgaataccatagcaattagggctatatatttgagttggaaacctgatagacttaaacgtttcataataactctcctttcttttcatgcttagtataaaacacaaattaactaacatcgtttacttttccgacaaactactaaccacattttaggataaccatggaagactaatacactatccatattatttcttatattatcttttggttctataatctattaaacatataaataacaaagtcaccctaacaatccataaaggtagggaattgagttggctccaatcattaaggataaggctattgataggtaaaacaataggaagccaatgaatagacaagaaaattttattactagcaaaaataataaaaataatttcaaccatagagataataatattactaacactgttcagactcacttgtataaagtagtgaaaatgattaagaaagactattaacatccaacttgataaacttactacaaatccattcacactattcataagaaggaggtttatgataagccaactaaataaagaaggtaggctaagggttaggtctactatcaaaagtttagccaaccatatacgtctttgcttagggtaactcgatatttcttgataatgattagcgtatttttcttgttcaatccctaaaattgacaaaaatgatgtcaatagcggatagcataaaaaagataatatggctaaattagttagagaaaaaccattaggaacgaagctcacatacattggaattgtaatgatctctaagacagcaaaactgagaataagataaagaccgaaagtattctttaatttaagtaactcactccttagcatttaattgtctcctttgcagtgaaaaagataaaagcaatgtcactactattgatagcatcatcgtaagtaacacctgaaaaatgctagtatgattcgtatttacaataatatcccccgatggtttaagatttaataaaaattgagctattttatagtgataagtataggggaaaacgaaccaaagtggactctgagcaataaagggtgctattaaaagacaaaccaatgtattaagagctaataggatgaattgactcatgtatttagacattaggtaaagtaaaggaatgttccataaagttgtcatccaaattaagattaaggaaatagctgttttaggaatatttattggaataaaacctgtgtaaataaatgcaacgagactgaggaaagcaagtaagaataaactagaaatcaatgtcctcattcctataagcaccattttcatcaagataattttccaagtgaaatatccatttgtaacattttgaaaatgcccagcctggtcttctaaacgtctatcaactataaacaaaagaccatttacaagatataaaaagatagcttcccaccaataaaccgagaaaggaacaaaaatctgtaaccctcccattaaaaaggctataagaacagttaaaaatggtatgatgattaaaaatttagtcgttcctaaatgtcgtaatttaagcaattccgaatagaatatcttttgcatatcactaacccccatgaacaattttaaagaagagtctctcaagactatctacatttttgttttcaccatcatattgaattttacctttatcgagaataagaatatgatcagcaaccttactaatttctagaagttgatgactggaaaccagaattgtcatcccttttgctttcaaggaacgaataaggtctagcaattcatttataccatcgggatcaaggccattagtaggctcatctagaattaaaaattggggatcagttaaaatagccattccaatcccaagtcgttgcttcatacctaatgaaaatttaccagcttttttctttccagtatttgaaagaccaagtatttctaaggtttcaaaaatttttgaatcaggaatatcatatagcaatgcttttgtttttagattatcaaaagctgaaagattgtgataaattgcaggtgcttcgattaatgcacctaatgaatggttgtttttggatgatccaacaaatcgaatttctccactacttttttggactaaaccaaaaagaattttcatcagagttgacttaccagcaccatttacacctaacagaccagaaactgttccagattcaattgtaaatgtgatgttgtctaaaatcgtcttatctttgtaggattttgaaagttgtttaacagttatttgcattggtacacctcttttagaatacgtgtgttttcaatataaactcatgtcttactaatatcagaaaaacacttactctcctttcttttcatccttagtataaaaaacaaatttaaggaaagtatcagtttttttgataaaatacaaaaaactatctcaagacttaacttgagatagctttctttatttaacaatagattctttgtagtcacactcttcattactacagataacttgcttgccgccgccacggactttcttctcaacgagataatcacctgatttaggacagttacgtccaacagggatatcccacgatgtaaattcacagtcaggatagcgatcacaaccataaaagacacgatttcgttttgtcttacgttcgatgacctgacctttaccacaggttggacaagtaacgccaatttctttggtaatggctttagtattgtgacagtctgggaagttactacatgcgtagaacttaccgtatcgaccaagtttgataaccattgggtgaccacagaggtcacaatcaaaaccagctggctcatccttgatttggattttttcaataccttcttcagctttttccaattctttttggaatggtttgaagaattcatcaataaccttctgccactgctccttaccgatttcaactttatcgagttttccttccatctcggcagtgaatttaacatccacgatgtctggaaagaattcgacgattaagctattaacgatttcaccaagttctgttggttcaaaacgtttagctactaatttgacatagtaacgacgttgaataacatcaagtgtaggtgcataagttgacggacgacccacaccattttcttccagcgtcttaatcagagtcgcttcagaatagcgggctggtggttgcgtgaagtgttgttcaggcgttgtcacaaccttcttaaccgtatcaccttctgccatatcaggaagcattttattcttatcagagtcgttgtaaacggccatataaccatcgaacttgatttggctaccatttgcagtgaaaatgactccgttttgagacaaggtcaccttcatcgtatcaaatactgcagctgtcatttgactcgctacaaaacgattccagataagagtataaagcttaagctgatccttatccaaatacttagcaatactttctggtgtttggaaaacatttgacggacgaatagcctcatgggcatcttgtgctcccgaactatttttcaccttgctgccatgttttgaatacttagaaccaaagcgttctgtgataaattcagcagcctgattttgagcaaccggactgatacgtgttgagtccgtacgcatataggtaatcaaaccttgagcgcctgaacccagattaatcccttcatacaactgttgggcaaccatcatggtcttacgtgtacggaagttaatcttattggcagcatcctgttggagagatgatgttgtatatggcaatggcgcattacgacgacgttcttttttctctaccttatcaacgttaaaatcatcacttgtgatacgagagagaacggcttgaacatcgtcattattgttgagcttaagctttttaccatccaaaccatagaagctagcctgaaacttcttagcacccttcttaaaggcaccatcaatagtccagtattcttctggtttaaaggccttaatttcattttcacgatcaataataagcttaagcgctaccgattgtacacgacctgcagaaagacctttcttaaccttcttccatagaagcggtgaaatagagtaacccacaatacggtccaagacacgacgagcttgctgggcatctaccaagtccatgtcaatggcgcgtggctctacaaaggcattttttactgcgtctttagtaatttcgttaaaaacaacacgattcttatcatctggctctaatccaagaatatgtgacaaatgccatgaaatggcttccccttcacggtccgggtcacttgcgagaaagacttgcttggcttttttagcttctttcttcaattcattgataagaggtcccttacctcgaatattaatgtactgaggttcgtagttgttttcaaaatcaatcgacatacttgattttttcaaatcacggatatgcccaacagaggctacaactttatagttgcggccaagatacttctcaatcgttttcgctttagcaggagactccacgatgaccaaatttttctttggtgtcgctctctttttagtcgcctttttagcagtcgttttctttgttgttttagttttcgtttttgttgtcgttgctgtcgccatagactatttccttataatgttataaactggctgcgccactcatctgtgtaaaatctagtcacaagacattaaaaaatgaaacatcttggaccgagcaactaacatgataccttccttttctttaactgtcaataaaaaactttatctctataggagaactttgattttcaagaaaactctgaaaggatgtcaaaccctgtcgtaatgcactttgcgccctcttgaatcaaatgatggcatccgtctgactttccatctaaaatatttcctggaatagcaaagacatctcttccttcttccatggcacgttcacaagtaatcagacttcccgagcgaagcttagcttctacgaccataactccttgacacaatccagaaataatccgattgcgttcaggaaagtggtacttgagaggctgttcacccggtccatattctgtaagaactaaatgatttttggccatatagtcctgcaaagctttattttctttaggataataaacatcaagtccggtcccgataactgcaatggtgttccccttatttttcaaggcctccatatgcgcacaagtatcaatcccacgcgccaatccactcacaatagtaaagtgattcccaagttcactaacaatttttcgaacggactgtttgcctgtttcagaacactttcttgccccaacaacagctagctttggtttactcagtaaatcaagattcccctgataataaaggagaacaggaggattataggtatgcttcagctcaataggatattctttatcaaaaatcgataacgtaggaaaacggtcgaattgttctttgagttgcttaatatctaaactcttatacttttccataaaaagaacggcatttttagacttggataccactgccatatcacgtaaactcaattttctatcttgagtcttttgatagtccaaaatatttaatatattcaaattcgtcaacccagcggctttaagtttaaaaagttcaaaattattcatatagatacctccttttcattattcgtaacagaaaagaaaaaagctccattatggaactttccttgattataaatcattttcagaggcaaaataagacgccgctcctaggaggttactatcgttatggaattgacaggcttgaatagttatggactcaagacctaattcagacttatccttaaataactcctcataggcatcgcttattccttctattaaagtaccttgcctgctgataccaccaccaataacaactttctccagcctaaagaagctctgcaaatttagcacaagaacggcaatttcatgacaatagtctttaaataaaagatttagctcttccgattgatttccctctatagctgagaatacggctggaccatcgtcttgatctaacccaagtaattgactggcttcatgaacaaagccaactgcagaacccttattatcgacaaggcttactaagccatgcataaacaattcccactggaagggtagagaggtttgactcatgctttggggacttggagctcgcagatattgggtgactgacagaggtgatagcaagtcctcctgtgagacaagtcctaaaccaacaccagtacctaaaaccaaggctgccccacaatctaagtcttgtagacttccatatctggcttcagccaaagctgccgcgtcagcatcattgataacctttacaggcagttgaaatgttttagtcaatcgtgatccaagaggaatagccgttaaataagggataagacctcccttgaaaatgaagccacgtttactatttatttctcctgggcacgcaatggcaatcccagaaatgatatccttgtgagacgagacaatatgctctaaagtcaaccaaaagtcgtctaacgttggtggtgttggaactttagattgattgctaatcctaaaatcatcatcaactaacccaaacttgataaaggttcctccaatatcaatagctaaaatcacaccacttcacctactttttattattgactttatgggttcaaagcttcttctatgaattggagtaacaccaaatttatctatgccagacaaatgatccttggtaccataacctgcatttttggcaaatgcgtaaccaggaaactcctggtcataatcagccatcatcttatcacgggttacctttgctacgatagaagctgccgcaattgataaagaattagcatccccttttataattgatgtttgtcctattggtaggtccaaagtcatggcatcaattaacaaatgttctggtttggaactaagtttttcaatagcatcagccatagcaagcttggttgcttcataaatattgacatcgtcaatcacatgattgtcctttataccaatcccgacggctaccgcttccttcatgacctgcgtataaatagcttcatgttttgattttggtatttttttactatcattaagaccttttattttgcaaagctttggtaagataaccgctgcagctaccactggcccagccaaagggccacgtccaacttcatcaacacctgcaatgagttcaactccctgagcataaagcgatttttcataactgagcatcatctctaagcgttcttcctcagcaatctcagctaggatagctttacggcgttgcttaatggcagtctgtacaccagcccgactatcttcctcaaaactggcccatcggtggtcgtcaagatctgtcaaagtggccaattgctctttgacttctttaattgtcgccatcagtatcgacctcaacaatatcaagtgtgtaacgacctagttttccatcacgaacttctttgacaaatagattatagaaacggtcataatcttcacggaagccaagttttcgagtcatttccataatgatttctggcgcctcttcttcaagttcaatccctttaaagcgttcttctaaacgttcaggatagtaagttttaaaatagttaaggccaaaaatcgtaacttcatccattggcaaaagctggtccttgatagctccggtcaaagcaagcttcaagccgaccaattcatcttcaaacttaggccacaaaatcccaggagtatccagaatttccaagtccttattagacttcaaccactgttgaccttttgtcacaccaggtttatttcctacaacggcaatttttttaccagccaaacgattcatcaaggtagatttccctgcatttggaatcccaataatcatggttcgcaaggtctctttctgaataccacgttcacgtagtcgttgaatcttgtcagccataagactcttagcagcgtctgtcaccaatttaactgtagattgttccttggaattgatggccaaggttttaatcccttgactctcaaaatagctacgccactcttttgtacgattactatcagcaaggtcagccttattgagaattaaaagttttggtttatcgccaacaattttagttagcatgggattttgacttgacagtggcaaacgtgcatccactaaaattgttacaaaatcaacatgcttaagattttcctgaacttgtcgacgagctttggacatgtgaccaggaaaccattgaatagtagccatgtatatctctcctctttattttcttagtaaaatatgatttaaactctttaaaaaaagccaaagacttggctttactttacttatattatatcagatttagtttaagatgcccaatcgataaaagttaactaagcctcaacaggcataaagttgccgacaattttaccgatgattcgcggatcttcgtcatagggtgcaaacttatcaccataacgtttattaagagaaactaaacgtagcccatcttcctcgcgataaacttttttaatataggtttgaccatcccagtctacagcataaacagctccatcataatcaaaacctgtttgtttgattagcactacttcaccatttaggtaggtaggttccatagagtctccaaatacccatgacgcaaaatcatgatccaattcttcatcatagaaaacttcatcatagttgccgtcaccaaagtaagtgtaaccagttccggctgataaacgctcgaaaactttgtaagagtaaagcggaacaacaggtgctttttgcttttctgcttcttgctcttctaggagagccttagtgagtcgcaaagcttcttggcgattttcctcatttaattccaagtagacttctacaatctcatgctcagaaagaaaataggtctcagctacaccaaaaagttcggccaaaaccgaaaggttcttttgattaggtttcgtcttaccattttcccaattaaaataagaggagcgtgaaattcctagatgcttagctactgatgcttggctcattccttgtgcttctcgaatttccttaagtctttgtcctgaaaacatggctacctccgtaagttaataaactaacataagtttatcaaaaaaagtagttgttttcaagtgaaactaactacttttacatttctcttttatctcattctttaactaaaaatcctagatggttaagtgcctcttcaatataatctatatcttgctcactatctgcttcgacaagatgataatgaacaccgtttgtcaaatcagataaggggcgaaagtcatttgacgaggcctggtctaaaaaatgactaacatctcgacgacaagtcaatttcaacaaagtctgaatttctccataaactggatgatctatcatgatattttgaatacggcctccattatcaacaatagccaaaagctcatcctccatatcggacactttatgattcaccttaaatagtcgatgtacataagaattgtcatcgctacttttatagatatatcccctattagttgaaataatctgggcaccatctgcacgcaagagggcaatatcttgaacaatgatttgacgtgtcacaccaaaatgctccgccaaactctgtccattcattgactctttagctccctttaagagtgccaataattcttgttttcgatttgaagccatagaccaaccatccctctttcaattagcgtatttttcgaatacttttgaaaatcgttaatgctataacatagtctatcatactatggacaatagtgccaaaaccaactaaaacaaagagaacatagaatagtttttggaaatcctctcctgttacggaataaaaaatcacgcaagcaagaacttcacctatggcatggataagacctaaaacaaagttgaaaagtaatgatgatttatggttttctatcgtttgtggaaattttttcaaatagagtgcgcctaaaaagccaaatataatatgtgaaaaggccctaaaaacaaccacaatcggatagccagccataaagtatcccaaactagaggctaagataacaaaagcagttacccagggagatataaacatggctagaaatattggaacatgactccccaaagtatacgaagccggtgggataatcagtttaattggcatgatacttgggataaggatagcaattgcagttaataaagctgcaaaggtcatttcttgaattctctttttaggtttcataatctactcctttttactgtatatacattagtatattacagtgtatagttgtataagtcaatatttttcagaaaaaaacactagagcaaaatgccctagcgttctatgtttcttatttacgttttttcttagcttttttcatcttattagcttgacgcttcatcgcatgtttcatggcaaatgaaccaaccttacctttaaggccaccaccaagcatttggctaagatccatatttccaagatctggcataccagcgccacccatcatgccttcaagagcagacatgtccatattacccatatccggcatatttggcatgttttttggcaaattatttgggttaagacccatttgacgcatcatttgctccatatcaccagacataacaccttgcatcatttgttttgcctggttaaagtctttaataaacttgtttacttcgatgaaggtattccctgaaccattggcaatccggcgacgacgacttggtgtcaaaagatctggattttcacgttcttcaggtgtcatagatgatacgatagcacgtttgcgcgcaatttgtttttcatctactttaacattagccaaggctggattgttagccatacctggcaacatcttgagcaaatcctccattggacccatattttgtacctggtctaattggtcaatgaagtcattgaagtcaaaggtgttttcacgcatcttttcagccaactcaagagattttttctcatcgtactcttgagaagctttttcgataagggtaagaaggtcacccatacccaaaatacgacttgacatacggtctgggtggaaagtctcgatatccgtaattttctcaccagtacccgtaaatttgattggcttgccggtaatctcacgaatagaaagagccgcaccaccacgtgtgtccccatcaatttttgtaagaacaacaccagtgatatctagctgttcgttgaactccttggcaacgttagcagcttcctgaccaatcatgctatccacaaccaagagaatttcgtttggatgagcaaaatccttaatatcatgcaattcttgcatgagagtctcgtcaatctgcaaacgaccagccgtatcaatcaagacatagtcattcttgttggcacgcgcttgttccaaaccatttttgacaatctcaactgctggtgtttctgttcccatatcaaaaacaggaacattgatttgttgccccaaagtcttcaactgatcaatggctgctggacgatagatgtccgccgcaatcatcattggacgggcctcttgttccttaatcaacttattagccaatttaccagcaaaggttgtcttaccagccccttggagaccaaccatcataatgatggttggaatctttggagatttctcaatttcagatgtttcagacccaagaatctctgtcaattcttcattaacaatcttgataatttgttgtgaagcatcaagagtatcaatgatttcgtgacctacagcacgttcacgaacacgtttaataaatgtcttaacgactggtagcgctacgtctgcttcaagaagtgccaaacgaatctctttagtgacttcttgaacttctttctctgaaagttttcctttacgtcttaaatttttgaaaacgccttgcaagcgttccgttaagctttcaaaagccatatatcatttcctctcttactttctgcttgaatctaatctctattatcaatgctgctgagcacagcaatttgttcctgaagatagctatcgtctggatattttttcatgatatcatcaaaaatttggctacgaacgatgtaatctgaatacatatgtaatttcatctcgtaagcttctaaaatcttctcagtacgcttgatgttatcatatactgcctgacgactcacaccaaattcctcggcaatttctgccaaactataatcatccgcataatagagctcaatatagttcatctgcttatctgtcaacagtgcagcatagaactcaaaaagggcattcatgcgattggttttttcaatttccataagctccattttaccataaaatcatggtgttagcacgattcttgtgcagaaaaaagcagtgacttctaattgttctccaaataaaattcaaaacggtctccaacatagtaacttcgtacatattcgaaagcctgaccgtcttggaggaaggaaatttgtgtcagactcaagagagcgtcaccagtcttaaccttgaggtgcttggctaaactactattggccaaactagctgatatggtctgctgacttttccctatttcatagccgttatcggtcagtgtcttgaagaaatgttccgtaatttctgactccttgaaacctcggataatcttctcagggatactggcaatctcataggcaactggaagatcgtccgcaaaacgaacacgttccatacgaatcacataggactgtggtaagacacctaaattcttgatttcaaattcattgggatgcacacgcttatatgaaataagctcactagatggtttcttgccttgggattttacaatctctgtgaaactcgtggttccacgcatcttttccttaactcgactgctagccacaaaagtaccactgcctggtttacgctctaaaataccctcgtctactaaaagtgttatggcctgacgcacagtcatacgactcacatcaaaagtctcgcaaagatcccgctcgctagggagacgttgcccgattttccaagtgccgtcatcaacatctgccttaatcttatcatgtatgcgaatatatgctggtagcatctaatacccccttctttacccctattttacaaaaaaactaatagaattgtaaaggtgacgactagacttacagtttatcgtataaatctaggtgctaagtccttaaaattgtgatacaatgattgcataagagtcatgtgtgacgtaaaaagaaagggtaataatgactgacatttctactttgaatgatgtgcagaaaatcattgttctagactatggtagccaatacaatcagctgattgcacgtcgtattcgtgaatttggcgttttctctgaattgaaaagccataaaattaccgctgatgaagtccgtgccatcgatcctatcggtatcgtactttcaggtggtcctaactctgtttatgccgaagatgcatttggtattgacgaagaaatttttgaacttggtattccaattcttggtatctgttacggaatgcaactgttgacccacaaacttggtggtaaagttgttcctgctggtgaagctggtaaccgtgagtatggccaatcaacacttcgccttcgtgcccaatcagaactctttgcaggaactcctaaagaacaagtcgttcttatgagccacggtgatgctgttacagaaattccagaaggtttccatcttgttggtgactcagtagattgcccattcgccgcaatggaaaatactgagaaaaacttctacggtatccaattccacccagaagttcgtcactctgtatatggtaacgatatcttgaaaaactttgcttttggtatctgtggtgccaaaggtgactggtcaatggctaacttcgtagatatgcaaattgcacaaatccgtgaaacagttggtgaccgaaaagtccttcttgggctctcaggtggggttgactcatctgttgttggtgtccttttgcaaaaagctatcggagatcaattgacatgtatctttgttgaccacggtcttctccgtaaaggtgaaggtgaccaagttatggagatgctcggaggtaaatttggccttaacattatccgtgttgacgcttctaaacgcttcctagatctcttggctggtgttgatgatcctgagaaaaaacgtaaaatcattggtaacgagtttgtttacgtctttgatgacgaagcaagcaaacttaaaggtgtagacttcctagctcaaggaacactctacactgatattattgaatcaggtactgagacagcccaaacaatcaaatctcaccacaacgttggtggtcttccagaagacatgcagtttgaattgattgaaccgcttaataccctctttaaagatgaagtacgtgcccttggtactgagatgggaatgcctgatgaagttgtctggcgtcaacctttcccaggaccaggacttgccatccgtgttatgggtgaaatcactgaagagaaacttgaaactgttcgtgagtctgatgctatccttcgtgaagaaattgccaaagccggtcttgatcgtgatgtatggcaatacttcactgttaacacaggcgttcgctctgtcggtgttatgggtgatggccgtacttatgactacacaatcgctatccgtgctatcacttcaattgacggtatgacagccgactttgcgaaacttccatgggaagttcttcaaaagatttctgttcgaatcgttaacgaagttgaccacgttaaccgtatcgtctacgatattacaagtaaaccacctgcaactgttgagtgggagtaaaatataaacctaatttaaagtgacttgattgatttaacagcattttgaattgttttaaaacgctaaaatctaattaattatatttggttccccaccaaataccccaccagaatttctttctggtggggattttttatatcttaattacaaaaataaatcaataagcaatgttatggggtcagaaaaatttttgcttttctgatgttcaatactaactcttacatcatacctagataatggggtaaaatcaaaactctctgatagttatttatttgtaaaaaaattcactttaatcatttgctatatttccttcattcacatttagcccataaatttcaaaatcatggtaggatccattatagaactcgaattgggaaatttcgctttcctttttaaaacctaaactgattggtataaacttacttttaacattctcaacatctatataaatcaaaagcttatcaattttaaatttggatggaatgatttttattaattgttttaatccctgctttacaaaaccttgattttcatatttttctgatatccaatatccaatttcagcttgatgtttttgtaaatcaatattatgtatatctatcatccctactggtgtctgattgacgcaaattgttaacataaataactcattacgctccattttttcacgtgcatactttataaacgctctttcattttcaatacttttcatttcttccacccaaggaagccacatagcaagacgttctcgttcaatagaaacaatctcatataacccttcactatggctatcggatatatataaaagttggcatcgtttcccacgtgatttaaattctatgaatagtttcgagtccaagttggtagaatccacttcatactccttgttataaatgataatattctttaactctttatttacgaaatcattatataacttttttactacttttcaaataaataaaattttgtctatctttttgaggacagaacacattacaacaacaaatgaattaaggtaaaactaaaaggacctagtcctatatagtagagaactaaatccttcacttaaattatttgtctaactttctagtatcagttcaagtttacaccactcgactcttcacatagtcaggatagcatataaagatgtttgcttacttagtgaaatccaatactttacgtccttgaatttcacctttttccatttgatcaaagacttctaccgctgtatcaacaggaacagtttcaacaaccggtactaccaagccttgtgcaccgaagtcaaaggcttcttccaagtctttacgtgtacctacaagagatccaacaacacggataccatctagaactgttttgacaattgagagatccatatattctgatgggagaccaaccgcaacgactgttccaccagcacgtacactatcgatagcctggttgaaagcaaccttagaaaccgctgttacaacagcactgtgtgtaccaccagttttttcttggatataacctgctacatcttcaacttctttaccgttcaccactaaatcagcgccagattctttagccaaatcaagtttatcttggttgatatcaacagccactactcgtgcattgaaaaccttcttagcatattgaatagccaagttacctagtcctccagcaccataaatagctacccattgaccaggttcaactttagcttctttaatagctttatatgttgtaactcccgcacaagtaatagatgaagcttgagctggattaagtccttctggaactttcacagcgtagtcagcagtaaccaaagcgtagtcactcataccaccgtcaacactataaccagcattttttacagagcgacagagtgtttcacgaccagttgtacaatattcacaatgaccacatccttcgaagaaccaagcgattgatacgcgatcaccttttttaagtgtttcaaccccttcgccaacttcttcaacaataccaattccttcgtgtcctaagatacgacctggtacttggccaaagtctccatgagctacatgaaggtcagtatggcaaacgccacagtactcaactttaaccaaagcttgaccatgaccaactactgctggtttttcatgatcaacaacttcaacacctgtacttgcttgattaacaacaactgctctcatcttaattacctccatatgataacttttaacaccttcattatagcactcacacagacaatgtcaacgcttacataaaacttttcttagcttgcgaaaactttcttgaaaacactctatacaagtgcaatagctactatttctactgctgatatagctatatttcaatcattcccaagatatctatactgtctcacaagtgtcttggaatccggtaggctgacttcaaaatggaaataatgattgcgtccatctctggcattctctttatttaatagaaaataattcttttgactgatagccatctccctcataatatcatccgtcaaaaaggttaagggaatatccatggcagaataacgataaaagtcttcttcaaattttaaatagctatcagaaaaataatcaatttgaagtttatcatcataaatttttctcttcctcatctatggtctcaacccccaaactaatttctaatatatcctttgttcgaatacatttatgtcgcttgcaagattttatagtaacttgattaaaatccaagtcaaccacatagccactacatctacagcgcctaccttgatcctttatctggaaacttcccaataattgacctgaataaagctggtttaataaagtaaacttctctaaatcatccaaatgactcctaagattttctttagtcttatcttcatgtagggagcttgtatgttctgataagaaaaagcccatccacttcatcattcccctgtcttgatgttccctagctgattgaaagggaaggtaactacggtctatcattttaagccatctaatcctccagcagagtgtccaccaataagcttacttcgagcaagactcctagacgcctcctgtaaagcagttgctttttgaatggtcgtaaagccaaattcctgtcgaatactgtctatagctgcctgaagcctttcttctttatcaatgtcatctggattatcaaataaagaaagaatttgaagcctttcatctacaaaatttgcataagagacactgacacttcgaacagtccctccttgatatttcttcctaaagagttcaataacatggcttattagtactcttgtattgttagcaggttcaatcttcatctgtgcttgtaacgaacgcttgctctctaactttgaaaatccaatgctaatggaaacttgacaagctttcttatgggctcgtcttaacctaatggctacctgctctgccatctctcttagaatcaattcaatatcagcttgacgctcatagtctcgtggcaagatttgagaatttcctaagccatgtgactttggtttataaggttgatgaacattactctcatcaataccgttagcatgaaaaaagaggtctaagcccacaatacctaactcctttttaagagtatcaggattgctattagcaagttctcgaatagagaaaatccccaacttgtttaaacgcttctccatccgctttccaattccccagaaatcggtcatatggggaatattccaaaccttagtctcgacatcttcataggaccagttggctctcatcgtagccgtatgtttggcctcattatcaagcgctaacttggccaataagggattgctgttagacatcccaactgtcgagtaaatacctgtctccctccaaatatctctttgaatacgccctgaaatcatatctaacttatcttttcttgtaactgttctatcgggaataaagtaattcagtgacgacgtgagatcaatgaaaccctcatcaatggaataaggaagaatgtcttcaacactggcataattctggaaaatgtgttgaatttggatattcttttttatatagaggtccattctaggaggaacgataaaggtaaccttggcccaagattcgatgtaatttacaaaatctctatccgttggaagtccctgctttttggcattataatagtgaaacttacgagaatgaatgtcaaaaggtaagtcataagaacgactaacatttgacttgccaaaaacctgcttaaatatgggtgaggaggctagtatcaaaccattagcattttcagccctactcatcacacatagagaagtcttaagagggtgtaacccacgttcaacacactctacactcgcatagaaagatttcatatctacaaaagcaatatcacttttcggttctcttgaataatcaaaatatcccatgcttaccctttcgttagtttataaactaacattagtataaaatataacttgttttatttcaagtattttccacaaaaaaataacaacatcccttctagaatgttgttatccttctattttttccctttaacttggtcggtggcaacatcttcgccaaaccatttgtcagaaatcttttggaattctccatttttataaagggttctaaatccttgattgatttttttaataagtgtcttatctgccttacgagcacctacagcaaagctttcaccctcgtaaccagcaggcataacgttatactgatccagaactcctgatttttctaagtagtaattagcatacacacggtcaatcaataggccgtcaatacgtccactatcaaggtcaatcaaggcctgagtaaaggtcgaatattggactgctttttggttggtcacgatatccttcaaaatcttcggagaagcattgaaagcatcataaccggaagagcctgcttgggcacctaaggtcttacctgccattcctgcaacagaatcaattcccgaagactttttggttaccagtacttgttcattgaccatataaggcactgtaaagtctgcagactgcttacgctcatccgtgaccgagtaaccattccaaataagatcaattgtcccattcttcagttctgtttctttcatatcccagtcaatagcctgccattcgacatcgataccatacaatttaaaaactgcagtggcaagatcaatatcaaaaccaacatagctaccatccttttcctcatatcccataggaacaaaggtcgcatcaaaaccaattttgattttcttttctttggtataggtttgccactgatctttctgagttgcaaaatgtgagcgcgagctacaagctgatagcgcaaacaaaggcaaaatgacaagacagcctagcaaaatcgtttttactatttttttcatggaaaatcctcactattttggattgatagtgacaatctcatcggcgatgtgctgtgcaaactgcatatcatgagtgataacgatttgcgtaatcccagtctcacgattctgcaaaatcaatttctcaacttcttgacgcaactcagggtcaagagctgatgttggttcatcatagccgacaattttcggatcaatcatcatagcacgcgcaaatgcaacacgttgtttttgtcccccagaaagagagtaaggataagcatttccgtgagctccaagacctaaacggtcaagtagggcttgagcttttttctgggcatcttccttagacattcccatcgtcttaattggcgaaagggtcaggttatctaagacagtcaaatgcggaaacagttgaaaatcctggaagacaaagcctagcaagttacgactttccatctgatccaagggaatctcttcattttcataaataatttgccccgaatcaatagtttcaagtcctgctaacatacgcaaaagagttgttttaccaccaccagatggtccgacaatagccaagatttttccttcttctactgtcagattatacttatcaaaaattttgtgttgaccaaattgcttggaaatattttttaattctaacataaggtctcctatttataatagttgaatttcttttcgatgtttttcgaagctacagtcacaacacccacaaggataagatagatagctccggccacaaacatcggtgctaaggtcgcatcacggttcgcagcggtacgactttccaaaagaaggtctccaaccccaagcacataaaccaatgatgaatccttaaccaagttaataatctcgttaaagatacttggcaagacaatcttgaccacctgaggaaggataatgtagcggatggtttggaaaggactaagtttaagcatttttgctgcttcgtattgtcctttcggaatagccaagattcctccacggaaaatctctgcgaaataagctgcataattaagtgtaaaagcaagaatagcagctggtagacgatcaaagacaatcccaacgcttggaagaacgtaataaacgaagatcaattgcaaaaggaggggcgttccacgcataatccaaacgtaaagggttaataaccaatttaaaggtttgaatttaatctgcattaagaaagcaagtacaatccctaatggaatcgacagtacgataacaatgaaaaatacttgaagtgtgactaccgcaccgttcaaaagggctggtaatacttccaaaacgtatgacatataaactcctataattatttagtattactgaatattataccaaatttttaaaaaaaatgatataagattttggaaatagtaaaaaggagtgcgactagacccaatttcaaaatgagttcataatcacactcctaggagacttaaatagtctgtcctgagaaacaaaccatacctaagtctagcatcactaaagtttattttagattttcttaacaaattctgatttaagtttcatggcaccaaaaccatcaatcttacaatcaatgttgtggtcaccttcaaccaagcgaatatttttaacacgtgttccttgcttgatatctttcggagcacccttaactttcaaatctttgataactgtaacagtatcgccgtcagcaagacgtgttccattactatcaagaaccacaagtccttcttcttctgcaacttcgtttggatcccactcataggcacattctggacatactagcaagattccatcttcataaacatactctgagttacattttggacaatttggtaatgacataattctctcctaaaattgtgatataaatactattctactttagattacttaattaagcaagggtgaaaacaagaaaaacaaacaacaccccttacaatgtaagagatgttagtatttttattcaactgtaactgatttagctaagttacgtggtttatcgacgtcgagcccacggtgaagcgtcgcaaaataagcaattaattgtgtcggtactaccatagaaattggtgataagtaagggtgaacattattaagaacgatgtcatcaccttccttagcaacgttttcctcagcgatggtcaatactttagcaccacgcgctgccacttcttggatattaccacgagtatgactagcaagaacaggatcagacaggagggagataacaggtgtaccatcttcgataagagcgattgtaccatgtttcaactcacctgctgcgaaaccttcacattggatatatgagatttctttcaatttaagactggcttccatagcaacatagtaatcttgaccacgaccaatatagaaagcgttacgtgtttctgcaagaagggctgccactttctcgtcaataacttctttttcagagagtgttgattcgatagattgtgctacaagtgacaattcatgtaccaagtcgaaagctttagctttttcattaccattagcttcaccgactgctttagccaagaaggcaagagctgcaatctgagcggtgtaagctttagtagaagctacagcaatttctggtccagcatgaagaagcattgtgtggtcagcttcacgagaaagggtagatcccggaacgtttgtcactgtcaaacttggaatacccaactcgttagctttaacaagaacctgacggctatctgctgtttcacctgattgactaataaagacaaagagaggtttcttgctaaggagtggcataccataaccccattcagaagaaataccaagttcaactggtgtatctgttaattcttcaagcatcttcttagaagcaaaaccagcatgatatgatgtccctgccgcaaggatatagatacgatcagcctcttgaacagccttaataatatcagcatttacagtcacttgacccttgtcatctgtgtaggcttggataagcttacgcattactgtaggttgctcatcgatttctttgagcatgtagtaagggtatgtgcctttaccaatatcagaaaggtcaagttcagctgtatagctatcacgttcttttacattgccatcataatcttgaacttcaacactatcagctttcacgataactaactcttgatcgtgaatttccatgtattgattagtttcgcgaatcatagccatggcatctgagcagaccatgttatagccatcaccaagaccaatcaaaagtggtgatttgttttttgcaacgtaaattgttgaggcatcttcagaatccatgagggcaaaggcatatgatccacggataatgtgaagagctttcttgaatgcttcaagagttgacaaaccatcttcttcaacgaattttccaatcaagtgaactgcaatttcagtatcagtttgacctttgaaatggtgaccagcaaggtattcttccttaatttcaagatagttttcaataacaccattgtgaaccaaaacgaaacgttctgtttctgagcggtgtgggtgagcattgtcctctgttggtttcccgtgagtcgcccaacgagtatgtccgatacctgctgtaccttctactccttcagttttagcagcaagttccgcaatacggccaacagccttaaccaattgactagatgtagcaccagctacaaagataccagctgaatcataaccacggtattctagcttttcaagtccttgaatcaagatatcagttgcatttgtgttacctacaacaccaacaattccacacatatttttaataataacctcaaatcaaagaggtcatgtctccttcatttaaaattggtatagtcaataagctctttaaaaagcttaacgaggacagtatattgcatatatttgacaatgtcaagtataaaaattggtatagtcctaaaaagaccttttactcgcctcttatcctaaggaataatccttaaaatatgctataataaggctatgcgaattcaacaattacattatattatcaaaatcgtcgaaaccggctcaatgaatgaagctgcaaaacaacttttcatcacacaaccaagtctttcaaatgctgttcgtgacttggaaagagaaatgggaattgatatctttatccgtaaccctaagggaatcaccttaaccaaggatggcgttgaatttctctcttatgcccgtcaggtagtggaacaaacgaatctcttggaagaacgctacaagagtcacacagagacacgtgaattgtttagtgtttcctctcaacactacgcttttgttgtcaatgccttcgtctcacttcttaagagagctgatatgacacgttacgagctcttcttacgtgaaacacgtacttacgaaattattgaagacgttaaaaacttccgttcagaaattggtgttctcttccttaacagctataaccgagatgtcttgactaagatgtttgacgacaaccgtctcacatataccagtctcttcaaagctagaccgcatatctttgtcagcaagtcaaatcccttggctaagcatgaagttgtctctttagaagatttagaggaattcccataccttagctatgatcaggggattcataattccttctactattctgaagagattctctcgcagattccccataaaaagtctatcgtggtttcagaccgcgcgacactcttcaacctattaattggtttggatggttacaccattgctacaggtattttaaatagtaatctgaatggtgataacattgtctctatcccgcttgatattgatgatgaaattgatattgtttacttgaagcatgaaaaggcaaccctctctaaaatgggagaaaaattccttgataacctcgttaaagaagtcacttttgacaactaatagatgttagtccccagcacataatgttggggactttttatcgccaaaactatccaattgaaagcacaaaaaagagcctttcgactctcatcattatttataatttttatagcttgcccaagcttcatctatagataaggtatcagcatctgtgtatgagcctctatagctgttccaaacaaggccacttgttgaaccagttgcttgggtaactggagcttgatcataggcagtcaacccatagtatgcaataatgctatttaatttagaagcgtaaagactatctgtagcataagtccctgtcagtgcctgagtggcatctgcataactacttgtatttgatttccaagtacctgcataagtagatgacgtcatcaaagcagcataatctgctagggaatcactcagacttccataagaacggaagggttcatcaatctcataagtctttcctgtaccgtcatcttcccaagtacgcatagtaacggagtttccattataagagcccttaatcccaaagaagttgtaataaggagcttgactcagacctgactgacctgaatttgattccagaatagcttgagcaattagaacagaagcatagatattgtaatcttgaccaatctgtctcgcagtctctccgatactatcaataaaagccgtcgtagtttgattgtaggcagcttcagctttagcattaacactgttatcattttttctatctgttgtaaaagctagaaccaaaaaaagtgaacacataaaagctcccacgataaaaatcatatacttctttaaatgacgatacatacaacccttccttcataagattttcaattataatattttaatactattctatcagaaaaactgacaagtcgcaactttcagacccattttccctgataaataaagcaaatgtcacctttacatcatatttataataagctataatatagtcaaattttaaggagataaatgaatgaaaataaaagaattcttaccaggattaagtattgcaatacttatatctctcctagcatggttccttggaaacttgttccctattattggtgggcctgtccttggtttatttataggacttctgctaggaattattctaagagattctcagaaatttaaagcaggaatgcaattcacttctaaaaaagtattacaatacgctgttattcttcttggatttggactaaatctttcccaagtctttaaggttggcgtaacatcacttcccattattctagtaactattactacggcactgcttactgcttatgccgttcatcgcatgttcaagttagatagtgaaattgctactttagtaggtgttggttcttctatttgtgggggatctgctatcgctgcaactgctcctgtaatcaaggctaaagatgaatctattgcaacagcaatctctgtaattttctttttcaacatcttagcagctctactcttccctcacttgggatcctggttgggacttagcaatcaaggctttgccatatttgctggaacagctgtcaacgatacttcttctgtaactgctacagctagttcctgggatagcttacatggaacatccattctagagcaggcaacaattgttaagttgacacgaacacttgctatcatccctataactcttgggctttctgtatggcagtcgcgaaaggataatacaaaggaagcattctcgctagccaaagcagtgcctaactttatcctttggttccttttggcctcactgattacaactgtttcaatgtcactcggtgtaacacctgccgtcttttcacctttaaaagacctttcgaaatttatgattattatggccatggcagctattggtttccaaacaaatctcaaacaactaatcactaaaggaggctcagcacttctagtgggaggagtttgttggttattaatcagtcttgcttctcttctcatgcaaaagctattagggctttggtaaaagacatctaaaaaactcacaatcttgctaagtttgtgagtttttattatagaatcattttttatactcaaagacataggtttgaataaccttgtccccatcgtttgttactttcaaatcaacattgtagcttttggtttcaccactaatatcctgaaccttataatcaccatcttgttttattgaagatgtagtctgccctgaataatgcttaacttcaagacttgaagttctgtctagagcaaaaggaatgagcccatttaaagaatatagcccatacaaaataagacataaaaagctcagtgacgcaaggctcaccaaataatatttaacaaaagcccccaatttcaacccctgtttactcacttaattgttatcttcctttaacttaacattatttttattagagtattttcaaattttattttacacacatttgggtattttgtcaaattatttgatatttaaaacagaacctatatttttctatatactaaaagccgttagtcatctaacggctattttttatttctgaaataacgtattcaagacggctatagagaccaagtaataagtcgtaacttcgattttcattttctttcaaaacagtgaaaactgttgtactataggtaaattcaaagaagtcatctaattccttgagccagtcatcaataacccctaaattttgatcaatgattgcaaacaaacttggttgataccagattgtaccttcaatataaaggtttttgtcagataatttagatagggatactttcaagtcagcaagctctcgtttagcaagattgggttcaatctttaaatcaaaaagtaagcgtgcatcatgatttagaatatcgagttctgcttgaagcagttgaatataatgtatcgctactaaatactggttcatgggtctctcctggtcatctgaaaatcgtactattattgtaccactaaagaatgaaaaaatgtagtaattatttaattttttacaggatttttttagaaaaaataccatgctttaaatttctgtttaaaaataatgacactagcgattttctaagagtttaagaaatgaaagattttttaaaaaaagaaaaacactcacgaatgagtgtatttctagtattaatgactaaccatttcttgggcaatttccaagccactaagttttccaggatagtaagttggccaattatccatctcttttagaatctcatcttggctactatttccgaagaaaatatggaaatgtgctgaagttgttggatctatttgatgatctgaaaattgcacatactggtaagggttatctgctgcttgactgtcggttgctgtgaagagataacggacaccttttttaccagaagcataagtcaaaatcttataaccatcataacgataagtgtgtgtcacgctacttccatcattttttgtgaaagtcatggtcatctttttaccatcaatagcaattttagaaacatctgtttgatagcccttagtgtagtactctttgtactcttgtgcggttttatccttatttaatagagatttgtattcaaatacttgatctaaagtaccatcttggaggtaaggatagaccgattgccactcaccagaccaatcagaaagttctctatctttgacatctttgtcatcaaagtaaccattttggactgttttcttatcatcacttcctgtttcaggttggatagctttcccttcaacatctgttgttaaacgaagattctttaggttctcagtcataacactgacataatcttcaccttttttcaactgttccttagttagtgattcaattggatttaaaactgctgtcttaactcctacttcattagctaaggttttggcaacgctacttgaagcattttcctcaaagtagatatagttaatgtcatattctttgacatacttagaaaggctagcgatacgttttgcagatggatcagattcagctgaaacacctgaaattggtacttgtgtcaaaccgtaatctaaagcaaggtaggcaaaagctgagtgctgggtaacaaaacttttctgtttcgcttgacttaaggcttcagtatactccttatccaaagtctttaattttttaaggtatttctcagcattggttgtaaagactgcttttttatctgggtgttgagcaatcaaaccgtccctaatagtttcaactaatttttgagaacgtttaggtgagagccaaacatgaggatcatattcgtggtgatgctcttctccaccgtgatcatgatcttcttcctctattccaggtaagagaaccatgccttgacttgccttaatgatttttgtatttttagtgttgatagacttttcaacttttggaacccaggtttccatattttcatttaggtagacgaaagtatctgctttttcaatgtcagcgacattcttagtagatggttgaaaatcgtgggcttcactaccagcgggaataagataagacacctctccctcatcgccaacaacctgctttgtaaattcataaacagggtaaaagctggtcacaaccttcaagtcgctatttccttttgaaccgtggtgactagtcgtataataaatacctgcaccagcagctaaaacaactgctgctattcctgctaggccaaaaatgcgtttctttttcatgatattcctttcaaaatacttaaccagttaatagtttactggttaagtatatcacacttcatttattttgcaagtactaaaataaaaaaattgaaatatttcgatgaaaaagaaatatttgatatactggaaatatcatttggaaagtaggttatacatgtttcgtaaattaaccctatatctttttttattgcttgcatccattggcctgacttatgatacacaatcatacacctcaggtgccttgtctggttcagcatacggtattattggactatcaacactaattgccttatgttatatcctaccaggaatatttctggttcgatacttaggtaagagatggcaggtgaaaccacttgttctcatatttgctctaattggtggagtctttattacaggatggatagctggttatgccaataccatttctcacgactgggtgactgctcatctttcttcaaagagtttcttctaccgctttgaggatgcccttatggcccccctagttgaagaacccctcaaactagctgcttttctctttgctatctatatggtgccaacaaaaagttacaaaggactcttgcttgtcgctattaccgcaggtcttgacttccagattagtgaagacttctcctatattctttcagatttgcctgatggtttttcttatacgatttcagggattcttggtcgtactgttggtgctgtatcatctcactggctttacacatccttccttgcaatggggctagtccttatatggcgttcacgtcaaaaattcattaattccaagtacagtcttattggtattctttatgtttgtggtgcttttgcggcacactttgcttggaattcacctcttcgaaatttagaaagcgatttgccatgggcatcaggccttctcatttcactcaatcttttctttttcattacactttatcagattctctcgaaactagatgaagaaaacaagtaatgtttagaatactaaaaaacctttccaattttatggaaaggcttttttgatgactttaatcactcatagaaaaacgattggtcatcaagttacttgcatcatctaagacttttgccaatagtttatctgtttctgactgaatcttatcactaattttttgattttctgcttcaaaatcaatactttcatcattagccaaagcggtatcaacatgattaatcatggcatggccaagagccatagttgtttctacataggcatctaaatcagcttcatgctgttggaaatgaggatcacagatagcagcaatcaagcgattactccagtagaaattacctgtatctactttatcagttgtttgacggaaataagcaggtgttgttccgacctgagtccagaatggcaccattgtaccgaatggcattgatccataggctaaccactgaataccagttgtttctgatggtttgttaggacgcatttgtaagagagctgtttgactagtacggttaataccgattggacggaattggcgttgacttaccacatctccttgaggtccatatgggtcataaggtgtatcttggtaatgaagactcaaaacgtatttaacatcttcaactgtaattttgcggtatggtttttggcaccatggaataaagaatgattttggatcatagtctttttctgggttcaaaaatttctgcatagcccaggcacgtggtgtattataatgacggtccttatctcgttgactaccaaaagcataacgtggattaaagtgttcattagaataagtcaaatccaagtgatgtttattaataaaatttcgaatgtctggtgaggcaagataatcgtctggattttcaaactcatagtgatcgataccaagttggtttgggttagtaacataggcatcgtctggaacacgtcttgcaatccaatggtgaccaccaattgtttccaaccaccaaatttcttcagtgtctgaaaaagcaatcccattagactcgtaagttccgtaagttccaaggagttctcctaaacgaaggacaccttcacgcgccgtcttgatatatggcaagaccaaagtcaacatatcctcttctccaaaaccatctttaacaagaggatcagcgccgagaacgcgcgcattggtcgtgattgtttctgttgcactcatggcaacattagctgagttaataccagcttcgccccaaataccgtctttcccaagcgcatctgggacagaagtataacgtagaggattatctggcaaatcaattgaaaaattgctaagcacagactggtaatgacgtggttggtcttcaggggtcacgacgagaaattctttgggcgtaaaaacgcctgattgagaatcctcagtacgtgcaatcatggtagagccgtcatatgaggctttcttacctactaaaatcgttgtacaagccataaaagcttcctttctacttacaaatcgtctgcaatcttattgatttttctgagacgatggttgacaccactcttggtcagaggaggttctatactatctgcaatctgctggatagagtaatctgggttggcaatacggagttgggcaatttggcgcagctccaccggtaaaatctccaagccaaccgtatccataatcttgataatattattaattgttttcatgctagcactaatcgttctagcaatattggctgtttccgcattattggcacgattcagatcatttctggtttctcgcataattttgacctcttcgaaggtatccttagagttcattgcgccgataacaaggagaaaatccataatgtcctcagctttttgaagataggtcacaaaaccatttttatgactcaaaaccttggcatcgagcataaattttttcatgagagaagctaaatcctctgcgtggtcttggtaaacggaaaaaatttctaattgataacggcccttttcaggatcacgtactgttccagtcgccaaaaaagcgcctcgtaaataggatcttccagcctcgtcatcttccattactgatgtttcaatgcctgtttcaaagccaaagaaagaatccgccaattgtaaatcggacaaaatatcattgacatggtcagcgacaaaaaccgtgtaaacacgatttttcttgagattggtcttgttgtgatgtctcaattcaggattactctgataacgactttccattaattggtagatatgtcgcgcaatctttgcattttctgttgagatggaaagagtcaatccttggttggtcaatccaaccgaaccagacatcttaatcaatgctgacaattcagccttgtctttgcttgaagcagcaattatctcttctttaaccttaattgtgaaactcatgacttgttcctcactagatgcatgagctcatccactaccaagtcaccatggtggaaggcaccaccattttcaagtcgcagaaaattagaagacacaactgttttagcttcacgacgtaagccctcaaaatcatgctcaacctgaacaaggtattcatcaaatttattactagccatgtattccttaggcactttcttaatattaactaggacattgtcaatcacatcagagccaagatgacgattaagcacagccacatggtcggcatctgagaattgttcagtttctccgtactgagtcataatattacaaatgtaagtaacatcagccttggtctcgataagagcctgacgaatctctggtataactagattgggcaaaatcgatgtataaagtgatccaggacctaaaacaatcatatcactattcataatagcatcaacaaccttacgactggccttaggctcttcatcattataggtattggtcacataaacgcgttcaatcatgccatcgtactgggcaatactactctcccctgctacttcatgaccatcttgaaaaacggcatgaagcgtcaaggctgtctcactagctggataaatctttcctgtaacatggaagaacttcgtcagaagctgcatggcattataggtagagccctgcatttctgaaattccagcgatgattaaatttccgagtggatgaccagccaaagcaccatcggttttatcaaaacgatattggaaaactctttcataaagtttaggcatatcactcatagctaccaaaacattacgcaaatcccctggaggtgtcagctgcatgatatcacgcaaatcacccgaagaaccgccatcatcagctacagttaccacagcagtgatatcaacatccttatgacgcaaactacgaagaatgactgggataccagttcccccacctattactgtaattcttggttttttcatgaacgattcactgtctccttacgtcgatccttatcacgatgtgtttcattgactgtccaatcatttttcaaatcttgggccagacgatgtgcaaaggctacactacggtgttgaccacctgtacacccaacagcaatggtaagaacagacttaccttctttcttgtagccaggcaagattggtttaataagctgtgtcaaatgattgtaaaactcttctgattccttatgtttcatgacataatcaaaaacctctttatccaaacctgtgaggttacgaagtgcaggatcataataagggtttggcaagaaacggacatcaaaaaccaaatctgcatccaatggcaatccatatttaaaaccaaaactcaaaacttcaatacggaaagaagattggtcttgttcagatgagaactgttcagaaatagccttacgcaactggcgtggggttaattctgtcgtatcaaccacgttttgactcaaactcttaagcggtgacaaaagctcacgctcaagcttaatgccatccaaaacacgaccatctgccgccaatgggtggctacgacgtgtctctttataacgagaaaccaattcaccatcagtggcatccaagaatagaatcttgaaattaagttcctcattactttccaatttatccagaatatcgttaatctcatcgaagaacaagcgactacgcatgtcaacaacaagagcaatcttgtctgtctcttcactatgttttaccaattcgataaccttaggtaccaaagaggggggcatattatcaatggtgaagtatccaatatcctcaaaggattgaattgctacagtcttacctgcaccactcatccctgttacaacaactaaattaatttttttcgttcccatgagactccctttctaatctttcttctttcaagacacgaataacgtctgacatcttctcaacttgttggctaacccccataatcatttctgtctgcaatttttgaattgtcagaagatctgattggtcttgttgaaccaagtggtctattttttcatgcaaaagtcggatttcttccttagactgggtattgacgtgatagtcgttacgcgcttgtaaacggtcataatccgatgctcgattctgactcatcataatcaatggtgcctgaacggccgctagagtagacaaggccagattcaacagaataaatggatacttatcaaaggcaatcccaaagggttgaacaacattcagccccatccaaatggccataaaagcaacgaatgacaagataaaagtccaagatccaccaaatcgggccacttcatccgccactttttgaccaaaagtaatcctactatccaactgttcctggatgtcttgatcctcgtacaataaactcttggtcacatcgtgaacggtttcccgaacatgttcgtttttctcattagcatttgcaataacttcatcaagaaaaaccaacctataatccaaaagactgatattactaataaaatcatgtccttgtaaatcagggtaatcttttttcaaaagcacctgcaaacgactatttagacgttcgaaataagagccatcggtttcatcgaaccactctttagagatataatcctgaactctcttaacctgcatattttcgccttctttctaggctctattataccatattgaaagcttaaacgttcaatagataaaggaaaagagtccaagactaacctcagactcctccattattgggacaattaatttaaacgcttcttattggtaatttaaagtccagtagtaagtaccgtcaccagcgacaacacaagctactgctgcttgagtagcatctggactcatgagaagttcacgaataccactactcaaccatttattggctacaactgaaccatcagattcacgacggtaaacaataccatcactgttgtaagtgtgtgaaatatctttggcatgtggaagggttgtgctattgtaaagatcatcagaccatgtaagtgctggcaaaccagcagctgtacgttgagcattgatttcattaagggcagccttagctgagtcaacttcaacataatcagagttttcagttggttctacatgataaacaaatttaacataaccaaattcaacatcactatattttttgtcgtcaacaccgctcttgagattagctgtaataacatagtcacgtgcccaagcactgcccttagaagcgttgaagttgtcaacatcttcaatttcccaagttacattacaatcccagccagcattatctaagaattttggagcaaaattcttaataacataatctttgaattcatccacattttggaatggaagagcttcaccagctttaccagtaccaactacattttcagaatacaacttaacacttgatgcattgtcatcgtacatgtattcgtcgtttcctgctggtttatggaaatctggatcaagctcagggtcatcattggcagtaccattgtagagtttccatttaccatcaacccatttgtagtaaccatcgataccacgcgcattatcttcatctgtcaatgccacacggtagtaataggtaccgttgtcatctacaaatcgtggatctgaatacatgcgataatctgttggtggcaatgttggttttggcaacttatcatagtcaatgtttgtttcaggcgcatacggtggtttttcaagttcaggagcttcagaacttgtttctgatgttgaacctgtctcagaagtagcaactgagtctgaggtgattactgaagttgaattacctgttgaagcagcatctgaagttgtggcagaggttgaatctacagttgacgctacttctgaacttgctgatgaagttgaatctacagttgatggtgcttctgaagttgctgatgacgttgaatcaaccatcgatggtgactctgaagttgcagatgacgttgaatctacggttgatggtacctctgaagttgcagatgacgttgaatctacggttgatggcgcttctgaagttgcagatgatgttgaatctacggttgatggcgcttctgaagttgcagatgacgttgaatctacggttgatggcgcttctgaagttgcagatgacgttgaatctacggttgatggtacctctgaagttgcagatgacgttgaatctacggttgatggtacctctgaagttgcagatgagcttgaatttacggttgatggtgcttctgagcttgctgatgaagttgaatctacagttgaagttgttggagcttcagaatctgtgcttgaagccttaacaagtacccacttaccatttgaataatagtaataatcgccattatctttcaaataatagtgagtaccattttcataacggtagtgagggtcatttctcaaaacctcataacctgtcgttggtgtattgttagaaccactattgttgttattatagtcaccaccacgaacccaacgtccgttatagtttacatagtagctaccatcactcaagatgtagtacaaatagccattgctatagcgataagtacctgattcattgtagttgttgtaaccaggattatagttgttatagccgtaattatagttataattatagccatagttatagtttggatagtaattattgtaaccgtagttatagccataattgtaattatagcctggataatagccattgtatccgtagttataaccatagtttggataatagttgttataccatggattataagaatagttattatagtaacctcggccataataactatcagcctgtgcatgattattaccaactaccgttggcgctaatatggctgcccctaaaacagcacacgaaaatagacgtaaactttttctcattgtcttcatcccctttttaaaaacaagtatacctttcataagcaatcgcttacatttccatttacaccttaattgtaagaaataaaacttctattgtcaaattattttaataatagaagtttttaagaacagaccaatgaaaaactaacaatacccttactttcaactataaaaaataaataaacaggtttcctttacgccttaaagacaagtgtctaaccaagaaaaaaagcccattatttgcataaggacttttagcttgacattaacgattatcaatattttctgggtaaagatcgtgattaaagagacgttgctctgccatcttttcatacttagtttctggacgaccgtaattataataagggtcaatcgagataccaccacgaggtgtaaatttaccccaaacttccaagtaacgagggttcaaaagctccaccaaatctttaccaatggtattaatacagttttcatggaagtctccgtgattacggtaactaaataggtaaagctttagagatttcgactcaacgcagagctggtctggaatataagaaatataaatatttgcaaaatcaggttgcccagtaataggacaaagtgatgtaaattctggacagttgaatttgataaagtaatcattatcagtatgacgattatcaaaagactccaagacttgtggagagtattcaaaaatataaggtgtctccttattaccaaggagagtgaggtttttcatttcttcttgttgtgacatttttcttcctttattgttaatttttctagacctttatatggtcaatttttaatctaaatttctaatgttaatcattaaaaaagtaaaaaaactatcaattctaagtttatagaatgtgaagattagactccgcgctcattatcatagagtagagtatgaagctgagggagaacacgcacattgccccatgagtcatcagcagctactgtctcccaaagctctttgaggcgacctaattgatgttggacaatattaccttctgctttcggttcaggattaccagccgaaagaaacatgacatctggctgataacgttcctgaatcattttagcaaaggctaaatcatcatcgtcaaaaacaggaactttgaaggtaactttatcaggatcaagttgtgaaacaataaagtcaagggtttccatattgacttccatcttggatgatggtggtttaggacttaaggttacttgatcaatatccttgagccactcctgccagcgagaaccctgagtttcaacggccaaagtcactcctctagccttgagttttgaaacgagttcagccatatttgccgctaaaagagctgggtttcctccagacagagtaacatagtcataagttcctagcgcatctaaagcctcaataacttcatcagctgtcatacgtgttggcttctctgacccatcccaagtaaaggcagagtcacaccaatcacaatggtaatcacatcctgctgtccttacaaacatggtcttttgaccgatagctcgaccttccccttgaaaggtcggtccaaaaacttcaagcactggtagtttgagtacacgttctctagtcatccaaccactcccgtctaaactctgcaagggctgttggtgtttcataaagacgcacatattccaaacgaagtcctctctcctcaggcagatgttgactcgtcgtctggaaaatccagaaaaccatattttccgcagttgtattcatataaggcaaagtctcattgagataacggtgatctaactgtggttccaaatggtccttataaatgctctttagatcaccaaaatcgaaggtcatgccacgctcatccaagtatccacttactgcaatctgaagatggtaggtatgaccatgaagtgatttgcatttgccttcataattaaagagatggtgggcagcatcaaaagtaaactctttagaaaccattgtacggtgaggattgtaaaccaaagactcacctgtttcttttttgatttctttcggtgcaaagaacattaagcttctcctctttctgctagatatttttcaaggcctttttgacgcaagtgacaggctgggcattctccacaaccagttccaataataccgttatagcaagttagcgttttttcacgaacatagtcaaaagctcctagttggtcagccaaagcccaagtctcagccttatccaaccacatgagtggggtttggataacaaaatcataggccatggcaagattaagtgtgacattaagcgatttgacaaaaacatcacgacagtctggataaccagaaaagtctgtctcacatacacccgtaacaatgtcagtaataccacgttgcttagctagaacagctgcaaaagaaaggaaaagatgattacgcccgtccacaaaggtattaggaacttcaccttcttctgcctcaatctcaatatcagatgttaaggcattttcagtgatttgaccaagcaaagacatgtccaaaacatggtgtttaagcctttgttcttgcgcaatctctttagctacttcaatttccaggctatgacgttggccatatgcaaaagtaactaattcaactgtttcataatgttttagagcccaaaataggcaagtagtagaatcttgaccgccactaaagacgaccaaagctgattgacgtttcataatattcctctttattcgtgatgtctgagacacataaaaaggccccttgggggagccaaaaaaacgccagtaatggttttttttagcgatggtgtctcccaaacatcgaaaatgatttatctttaatagtctatcatagttgagaaaaaaagaaaagagccaaggctctcttcattaatcaatctcagcgataacttcgatttcaattttaacatcttttggcaaacgtgccacttctaccgcagaacgtgctgggaaatcagatgtaaaggcagttgcatacacttcgttaaatggaacgaaatcgttaatgtcacttaggaagcaagttgttttgacaacgtggtcaaagtctgtaccagcttctgccaaaatagccccaacatttttaagaacttgttctgtttgttcttgaattgtttcgccaatgatttcacctgtttctggtgacaatggtacttgaccagaagcgaacaaaagattgccaacgattttaccttgaacataaggtccgattgctgctggtgctttatcagtatgaatagtttttgccatgatagttctcctttgactaatatgttgctattataacaaaatattctgaaaattgaaacatataattccaaaaagaaaagaatcagcactaggctaatccttctcctactatttcagatactttttgacatagctatagtagtctggtttttcttttttattaagtgcaaagagcatttggcccttatggggctctttctcatcatttggttctagaaagagagcaacctctttggattgagttgggaaaaataccgtataagtcgtctctttcccctgatcttttactttaagcgaataataggtaaagtcatctttagacttgggaccatccactgtatagttataatcctgctcaccaatcttgaccttatctttcttgaagacaatcgtataatccttctttaaggcatcttgtgcatgccattcaccctctagtgagggagcagacttgctgcaagctactattgaaaccatacaaagtaaggccaaaagaccaagtaaccatcttttcatacttttgcactcctaaagaattttacttatggtttgatacggtgcaacatacgtgggaatggaatagcttcacggatgtgttttgttccagctacgaaagtaaccatacgttcaataccgataccaaaaccaccgtgtggtactgaaccatatttacgtaggtcaagatagaattcgtattctgaacggtccattccgagttcatccattttagctacaagagcatcgtagtcatcttcacgcattgaaccaccgatgatttcaccataaccttctggagccaaaaggtctgcacaaagaacgcgctcaggattaccaggaactggtttcatgtagaaggccttgaagcttgctggataattaacaacgaatgttggaacaccaaaatagttagaaatccaagtttcgtgtggtgaaccgaagtcatccccatgttcaaggtgctcgtaatcagtatcttcatcattttcatgtgcttgaagaagatcgatagcttcatcatatgacacgcgcttgaatggctcagcaatgtatttcttaagaagatctacatcacgttcaaggatttcaagagcttgtggcgcacgatcaataacaccttgaataagagctttaacataagcttcttgcaaatcaagtgactcatcatgtgacaagaatgaatactcagcatccatcatccagaactcagtcaagtgacgacgtgtttttgatttttcggcacggaaaacaggaccaaagtcaaatacacgaccaagagccatggcaccagcttcaaggtaaagctgaccagattggcttaggtaagcaggtgtaccaaagtaatccgtttcaaacaattccgttgaatcttcagctgcatttcctgacaaaattggactatcaaatttgatgaaaccatttttatcaaagaattcgtaagttgcgtaaataatcgcattacgaatttgttggacagccatttgtttacgtgaacgcaaccaaaggtgacgattatccatcaagaagtcagttccgtgttcttttggtgtgattgggtaatcatgtgattcaccgatgacttctactgctgtcacatccaactcgtaaccaaattttgaacgttcgtcttctttaaccacaccagtcacataaactgatgtttcttggctaaggcgtttaacagtatcaaatttttcagtaccttcttcttcaccgtatttttcgatgaagttaggtttgaaagctaccgcttggaagaaggcagttccatcacgcaattgaagaaaggccaatttccctttacctgatttgttagctacccatgcaccgatagtgatttcttcgcccacgtgtttaggcacatcaataattgaaactaattgtttagacatgtaattacttctcttttcttttgatctatattaattctatttttccataaaggctttgattcggcggactgcttctttcaaagtatctaagtctgttgcatagctaagacgaatattttcaggtgcgccgaatcctgcacctgttaccaaagcgacttcagcctcctcaagaatagcgtttgtaaaatcattaacatttgtgtagcctttgatttccatcgcttttttaacattagggaagaggtaaaaggcaccttgaggtttgatgacttcaaagccaggcacttcagctaggagtggataaattgtattcaaacgttcctcaaaggcctgacgcatttcttcgatagaagactgatcaccagttaaggcttcaatagcagcatattgagaaactgctgtaagatttgatgtcgtttgactgataatcttagccatacctgaaataatttctggatctccgacagcaaaaccaacacgccaacctgtcatagcataggtcttagaaacaccattaatcacaattgtttgcttacgaatggtatctgaaagactagaaattggagtaaaggtgttgccattgtaaaccaaacggccatagatatcatctgctaaaatcaagatatcgtgatcaaccgcccagtcaccgattgcttgcaattcttccttgctgtaaatcattcctgttggatttgatggagaattaagcaagacaactttagttttttcagtacgggccgcttcaagttgttcaaccgttgctttaaagtgattagcttcagtcgtttggaaagtgaccggaacaccttcaaccattttaacttggtctacgtaagaaacccagcaaggtgttggaataatgacttcatcaccaggattgatgaccgtagcaaagaaagcatataagataaacttcgcaccagtgccaacaacaacctcatttggatttacagcatagccatagaagttttccatgtaagtgctaatcgcatccttaagttctggaagtccagaagctacggtatagaaacttgccttaccattttcaatagaggtaatagcagcatcttgaatgttcttaggtgttacaaaatctggttcaccaagtgtcaaactcaagatatcacgtccttgagctttaagagctttagcacgcgcactggcagctaaagtaacactttcttccatttgtaatacacgatttgataattttgtcatttcattatagtccttccactttaataacctgacctgagataaaatcaaccagataatactgggttcctgacttcacttcccaaataggagttttgccatatttccctaggtggacataggatatatccttagcaccataggccttagcagctttcttggccactgacttacttataccatcagattgcttgtagatatcaacctcacctgaatcatgactcacgataacggccagtttctcaccttgaccagactttccaagaagtccgtaataggtagcctcaccatggtagatatcaaattcagtaacagtcttaatatctgctttgctctctgctatggcaataaccttcttttcagcgtctacataaggcttagtcgctacaataagaatagcagtcaaagaggcaattaaggtcacaacgattacaattattccaaaaatgaactgttgctttttggtccagggtgaacgttgtttacgcataatgcctcctaaaaaagtttctgaatttattatatcagaaaatgataaatctttacatagcaatatagctagtattgagcaattaagtctatcttttttataagtcagtaaaatttataaaacctaagtaatcttagaaaaggttggtttttaaaagttaactttctttttctaagaaatcctgaatatcctctttgacttcttcgaacttagcgtgcttaagcgcaacttcttgtgtcacttcttttagaaatagttttccataactcttaacgagcgggcgattatccataagaagaatagctgaacgctgttctggacgtctttgagcacgcccgatagcttgtttgaaacgtaaaaccgtcatgggaagactgtaactatcaaaggtgctctttccttgcttagaaaaccaagattcaatcttttgatagaaaggatccttaggattgtcaaacggcagacgtgcaataacctcaattaccctatcttgttgagcaaagtcaacaccttcccagaatgaccccataccaagaaggagattggtctcacctctatcaaaacgttttttgacattaaaagctgtcccatttttctcttgagttaggtgacgaacttccctatgatccaataaatccgaaacagccatcatactctttcgagacgtgaatagtactaaaattggatattccatttcagatagcttctggagacgctttgcaagagcaacttcatactcctcctcagaagaaactccaatcataggcatgctttgatcaatccaaatagcttgattgggtaaagtgtccattgggaggctaaccttgcgtacctgatctaagcccaacaaaccagccacatcaacatcaggtcctacatcaatagttgctgaaacaattatcactttttgagcacttggtagataagctgaaagttctaagagttcttgacgtgacgcctttaaataagtcacacgatgttcctgataatagtctgtttcaagccaaaaatggctgtaaaggggtgtcttcagtggagacaacatctccatcaaatcactttcaccttccagttcagaaatggtttgtagcaaacgatctaattgctggcgattatactgcttctgaggaaattgttggtgttcttggattagatggctaacttcaaactgcaaattttcgagcaagcgttgttgaagtaaggtttgattaccactatcaagaatacgatggatatgttgcaaaagcactgtaagattgacttgatgacgtgaaaattgttccaaagccagaaccatcttttgtccctcatcaatcacaagattttttcctcgaacaaaatcatgatcatcttccatacgcgtcaaaagataagcatgattggtcacaactaccctagcttcttgggctttttggtaggactgttgccaaaaatcatattcagcaaaaagactatccacctttaacttaccatcgtgcttaatctcatcaaaataggccatatagcgctgtttttgtctgatttcatcgagatcccctgtcttcgtttcagtcaaccaaactaagagttgcattttgtaacgattaatcaaacggttactgtcctgacgaagtaaggtctggtaaaaggcatctaacttgatataattctgaggtcctttgagactatggaagttaatattaaagacatccgataaggctttggcttcctgattcataatctgattttgaaggagcttggtcggaacagccaccaccactttatctacatcagactgtgccaacaagggaagcaaatagccataggttttcccgattccagtctgagcctgaatcatggaaatatcagtattatcaagctcccttcttactgcctcagcaaactctctttgtttaggtcttgattccaaatctaagagagcaatattggtatcaaaatcttgagacagttttcgttctgccttataagtcaaaggtctacgaagaacaattccagattcttcaagcgtgacatattcttttgatagacctaaattttgacctcttatagcatcacgaataaccaactcagtttcaaaaagaagattatctgaaaaggtcaaaagcatctcaattgtctgtctaggtaagctagcaatcttatccatcaaatgaaacaaaagctgtccggtcgctctcgcatcttcaatagcggtatgggcctgagctaggtcaagattaagaaccttggataaatgagatagcttatattgttctagcgtcggataaaaaacctgagccaattcgacagtatccacacgaggagtccttagttcgaagccctccatgaaaagtgcctctgcaagcaaattggcgtcaaatttaacattatgggcaacaaaaatacagtcctcaatcagttcaaaaatggttctagcaatttccgagaaatctggggcttgagccaactgctgatcggtaatccctgttaaatgaataatgtgatcatctagttcttggtgtgggttaacatcactcgcaaattcgtcaatcacctgaccattttgcatgatgacaattcccacctgtataatactagccgttgacgaagcggaggttgcttccaagtcaacaatggcatatttattcgtgtttttttcactcatagtgaccttattatagcatatccaaagccccaaaaaaagacaaagccatcattctgatattggaaaaagcctgaaattcgtgctacactagagctatgaaaataagacgaattttaaatcctgttgctcaggaaaatacctatattttagaaaacgatacagcctgtctagtcattgatccaggaagtgatacttctgctatcttagctgagcttaaagcaagtgataaacctgttgctgctatcctcttgacacatacacactacgatcacattatgagtgttgaggcagtccgtcaagcttataattaccctcctgtttatgttgcagaggctgaaaaagactggttgatgaatcctattgataatttatcgggacttccacgtcatgacgatatggaagacgttattgtcaatccagcagaatactacttcgatttcactcaggactataacatcgaggatttccagtttaaagttgttccaaccccaggacattctatcggaggcatttctttaattttcgatgaagaagaaatcgtcttttctggtgatgccctctttaaagaaacaattggacgctgggacctcccaacaggaaaccacgatcagttactcactagtattcgagagcaactcttcacccttcctaaccactacaaggtattccccggacacggttgggacactactataggccacgaaaaaaactttaacccacatttttcataaaaataaaagctcagcaaactataaagctgggctttttacatgcataaaaaagaaggtctaaagaccttcttacttgaaatactagattgtatttatttagatttgatatagttaacaccatcagcttttggtgctactgctttaccaaagaatgcagccaagacaataattgtcaagacatatggtgcaatttgcaagtagacgtttggtacatgtgaaataagcggaagttgtttcccgataattgccaatgattgtgacaaaccgaagaataaacttgagagcatagctccaactggattccaacgaccaaaaatcatagcagccaaggcgatgaaaccaggacctgcaatcgtcgtaatagcaaagttgttagagatggattgagcataaactgcaccaccaacaccaccaaggaatcctgaaatcatgacaccatagtagcgcatacggtaaacattaataccaagtgtatccgctgcctgtgggtgctcacctactgagcgaagacgcaaaccaaagcgagtcttgaagataacccaccaagacacaactgaaaccaaaatcgctacatatgcaatcaaggaaacgttcgtaaagaagactttacccaagactggaatgtggctcaaaattggaaatgatacagttttaaagttatggctaatagctggtgtttggccggcaccaaagataacacgtgtcagaaagactgctaaagatggagcaatcaagttcaataccgtaccagagacaacatgatccgcacggaaattaatggtcgcaaccgcgtggagcaatgagtaaacaagaccaataagacctgctacaattgcggcaatccaaggagttgcatcaccaaaactatctgcaaaattcaagttaaagagaacacctgcgaaggctccaataaccatgattccctcaagaccgacatttacgataccgcctcgttcagagaaagttccaccgatacttgtgaaaatcaatggtgctgagtatttcagcatagaggcaacaatcaaggctaaaattgtaatgaagtccatattagttttgtcctcctttagctttcactgacttttgacgagggcgaacccaatatctaataatatagttagcaccgacaaagaagataatcaaagcagatacaacgtcgataacttcaggaggcacaccaatcataccactcttacctacagacaagacaccataaagaagggcagcaaacggaataccaataggtgaattagtagccaaaagagcaaccgccataccgttccaaccaattgccaatgaagagttttgaacaaaggcattttggaaggtaccaagtccttctactgttcctccaagtccacaaagggcacctgaaataatcatagacatgataataacacgttttgatgacatccctgcatattcagatgcatgagggttaagacctacagatgtaatttcaaaaccagttgttgttttcttgagcatgaaccaaacaaggaaaactgctgcaagagcaaggaagaaaccaatattaaaacgtgagccaccggttagagaggataagaattctgtttgatagcttgcagaggctgcgaccttattagatgcttctgatgaacgtaacatgtcggctgtaaaaccaaatcgaacaatattgtttgctacatacaaaatgatgtagttcatcatgatggtaacaatgacctcactagttcccaagtaagcacgaagaatacccggaattgcaccagcgataccaccagctactagaccgatgattactgtacagaaaactgaaactacttttggtaattctggaaatgataatgcaaaccatacagccgaagtccaacctgctaaagcctgaccaggcaaaccaacgttaaagaaacctgccttagaggcaacagcgaatccaagtgcaatcagaatcagcggactcatggcacgaagaatttcaccaatatttttcaatgaaccaaaggccgttgtgaagagatcatagtaagcccagaatggatcgtaaccaaagattaacatcaatacagccccgatcaacattcccaagaggacagcaatcaaaggaactgcccaattttgtgttttcttagacatttgcttcctccttattcaattgtccaccagccattaggataccaagatcttgcttattcgtttcagcaggatctaggataccttgaattgcaccatcgtagataactgcaattctgtctgacatatcaagaatttcatccaattcaaagctgactacaataacagccttacctttatcacgctctgcgataatacgtttacgaatgtattcaatggcacctacgtcaagaccacgagttggttgactgacaataagaagctctgggtcacggtcaatttcacgggcgataacagctttttgttggttaccaccagacaagtcaccaccagcaatcaactctccagcaccacgaacgtcaaattcttccatcaattctcgagctttagcattgataacattatagttcaagataccatttttcgaatttggctccttgtagtaggtttgaagggcaatattttcagctactgtcatttcaagaaccataccgtcacggtgacggtcttcaggaatatgaccaacactcatctctgtaatctgacgagttgtcttatgaataatagattcacccttgatagtaatgtcaccagacttaactttacgtagtccagtaatcgcttgaacaagctctgtttgaccgttaccatcaataccggcaataccgatgatttcacccgcacgaacatctaaagataagttcttaacggcaggaacaccacggttctcattaaccaccaaatctttaatagaaagaacaacttcttttggatttgaaggaattttttctgttttaaaggagacatgacgaccaaccatcatttcggccaagtcagcatttgttgatccttcaattgtcactgtatcaattgatttaccacgacggataactgtgacacggtcagaaaccgcacgaatctcatccaatttatgggtgataaggataattgacttgccttctttgaccaaggttttcatgatgtttagaagttcagtaatttcagacggagtcaataccgcagtcggttcatcgaaaatcaaaatatcagcaccacgatacagagtcttaaggatttcaacacgctgttgagcaccaacagaaatatctgccaccttagctgttggatctaccgcaagaccatatctttcagagagctcagtaatttccttaatagccttcttcatatcaaggacaccaccagctttggttacctcactacccaggatgatattctcagcaactgtaaaagcttcaaccaacataaagtgttggtgaaccatcccaatccccaatttcgttgctttcgaaggtgaatcaatcgtcacctcttgtccattaaccttaataatcccgcttgttggctgtaaaagacctgcaagcatgttcattaaggttgacttaccagcaccattttcaccgaggagggcatgaatttctcctggtctcacatcaagattgatatgatcatttgccacaaattcaccaaattttttggtaatatcgtgcatctcaatgacatttggcttcgtcatacaatctcctttcaagaattatttttatatcagcaaagggaaatataaactgcttccctttgctgagacaaaaattgtcccagtttagatattatggattatttgctaagaccatcagttggtttcaattcaccattcttgatttgttctttagctttttctactgcatccttgatatcagaaggaagcttagatgttacgatgtcaacaccaccatcttttataccataagtcttagtagaaccaccttcaaatttatcgcctttaagttgtccgttagcgatatctttaacaactgtaccaacttttttgattgttgaagtcaaaacaaagttagattttttcttgtctgaagatgtatagttaccttctgcattttggtcacggtcaacaccgattacccaaactttcttatcgctgtcagcatcaagtttttcgttaacttctttagctgctgtgaagacaccagtaccagtaccaccagctgcttgatagattacgtcaacgcctgaagcgtacatagttgaagcaattgttgtacctttagcagcgtctgagaatgattcagcatattgaacttgtacatcgatgtctggttttacagatttagcacctgctgtgaaaccagcttcaaaacgtgtaattgtatctgatgtttgaccaccaatgaaaccaactttatttgtttttgattgcattgctgctgcgatacctgcaaggtaagcaccttcgttatcagcaaacaaaacgctctcaacattcttttggtctttgatgacatcatcaatgattacgtagttaacatcttcatgttccttagcagcatctgaaacagcatcatgaagggcaaaaccaacaccaaagatgaggttgtaaccttggctttgagcagctgacatattgtttgcaaagtcagactctgagtttgattggaagtaagtaaagccagaatcttttttaagtttgttagctttaccccactcttggagtccttcccatgctgattggttaaatgatttatcatctaccccaccagtatctgtaacgatagcagctttaactttagaatcagctgatgatccaccgcgtccgccacgagcacatgctgcaagaccaagtgctgctacagcaacaaggccaagaccgataattttcttgttcaatttcatcttgaacactcctcctataacttgcaagaaaacttgcttaataaagaataaaacaactagactattgtaagtccgtaaaagagtatggtaacaactctccgactgtcatctcgactgtcgatttatcttcagcgataagaatcactttagaatcggatttaaaaaattcaaccatcacttggcgacaagcaccacacggtgagatgggctctttggtgtctccgtatactgcgagacattcaaagtcacggtgtccttcagataccgctttaaaaatagccgttctttctgcacaattggtcaatccaaaagaggcattttctatattgcagccttgaaagatttctccattttttgtaatcaaagccgcaccaactctaaacttagagtagggaacataggcattttctgctgccaatcgagctgcttctatcacttgctctttttcaataactgtcatgactttcttgccctttcattatggccactcctgacgaagtaccaatacgggttgcaccagctttgataaaggctttagccgcctcaagtgtacgtgctccaccagatgccttgactcccataataggaccaacagcttctcgcataagttcaatattttcaatggtagcaccaccagtagaaaaccctgtagatgtcttcacaaaatctgcacctgccagttttgctaattggcaagcttcgaccttttcttcatcagtcaatagacaagtttcaataataaccttcacaagttttcttccactagcttcaacaacagctttaatatcgtcttcaactaatttaagatttctagatttaagagcaccgatattgattaccatatcaatttcatccgccccattggcaatagcatccttggcttcaaaagccttaactgcagaagtcgatgctcccaaaggaaaaccgataaccgtacaaactttaacagaactatcttttagcaattcagctgccgttttgacccaagttggattaacacagacgctggcaaactcatacttcttagcctcatcaattaaggaaagaatctgttctttattagcatcagcttttagtaaggtatggtcaatatagctattaacagacatagacaaactccttaattagatttggattaaggcctaagaaataatttttaatatttcatttggctttttacacactctaccaataataacatttttttcgaattcagtcagcattttttcagataaaatttcttggctatagaccttggcaataaggtctccttgagtcacagaatcgccaactttcttttcaaatacaattcctgtttcataattaagactatctgacttcgtagctcgacctgctcctaattgcatggcaaatttcccaaatgccatagcaggtaactctttaatgtaacctgtttcatgagcatgaatatctgtcacgacaggagcactggtatgacgataaagatcggtcaaatcaccaccttgagcttgaatgagttcttcaaacttagcaagagcttttccacccactaagtgctgacgaatctcttcctgactagcttcaacctgagctaaatctaatagaatctcagccaactcacagataaagtcagtgatatcttcacgtcccctaccttgcataatttcaatagcctctgtgatttctaaacggttaccaatagccttacctagtggctggctcatatctgtaataactgcaatcgtttcacgattgacctcatgacctagtgcaaccatggtttcagacaacttctcagcgtcagacatatttttcataaaagcgccttgaccaacagtaacatccagtaaaatcttatcagcgcctgctgcaatctttttggacataacagagcttgcgattagaggaatggaatctactgttgcagtgacatcacgcaaggcataaagaagtttatcagccttaactaaatgctcagactgaccaatgagggaaattccaatgtctttaacttgctgaatgaactcttccttgctacgctcaacctgatagcctttgatagactctaatttgtcaatcgttccacctgtatgtccaagaccacgaccactcatcttagctactggaacaccaaagctagctacaagtggcataaggatgatggttaccttatcgccaacaccaccggtcgaatgtttatctaccttaacacctggaatttccgacaaatcatattgttcacctgaagcaaccatatcagtggtcaaatcatggatttcacgaatagacattccttgataataaattgccatcgccagtgcagctatctgatagtctggaatattcccagacacatagccattaatgagatatgaaatttcctctgtgcttaactcgcctccatctcttttcttttcaattaaatcaacggttctcatattttctcacttctaaggatataatatcctttatcctttttaacgacttcagcattaccaaacacatcctccatcttagctttagctgacggagctccttgttttttctgaataacaatagttaggttaccaccttgattgagataatcatatgcctcctcaataacttgatgaaccaccttcttgccagcacggataggtggattagaaataatatagtcaaaacttccagtaacattttcatagacattcgattggaaaatagtagcttcaaccttatttcgttcagcattttgtttcgctaaatcaattgccctactattgatgtcaatcattgtgactttgactccttgtaccttggccaaactaataccaagaggaccgtagccacagcccacatctaatagtgtgtttccagcttccaaatctaatgcactcaaaagcacttgacttccataatcaatcatttttttagagaaaaccccagcatccgtataaaactgaaaactttctcctaacaaatttacctttaaatcatgaatatcgtgagccgcatctggcgtctcagcataatacatttttgacattattttttccttctagatagtcttttccctttatcgtatcataaataccaaagtaaggctagtgatatgataaggcttacattccggctttttttctgctataatgttagctatgttaaatgaatttatcaatttcgaaacgatatcacgtaaggagtggcaacgccttcataaagaaggtaatgccccattgactgcggaagaacttgattccattcgtagccttaatgacaagatcgatgtgcaagaagttagtgatatttatcttccccttatcaatctcattcgtatctatcagaaaacggccaatgatttaaccttttctaagagtatctttttacaaaaatcacagactaatcgtccatttattattggggtatctggttcagttgctgttggcaaatccactaccagtcgtttgcttcaactcttgttacaacgtaccttcccccaatctaaggttgaacttgtaacaaccgatggctttctctatcctaaccaagtcttgaaagaaaaagacatccttaaccgtaagggtttccctgaatcctacgatatgccgcttcttctcaattttttagatactataaaaaatggtggtgatgtcaatattcctgtttactcccatgaaatttatgatattgtaccaggtcttacacaagaaatcagacagcccaattttttgattgtcgaagggattaatgttttccagaatcctattaaccaaagactctacatgagtgactatttcgatttttctctttacattgatgctgaagttaataatatcgaatcatggtatctcgaacgttttcaaacccttcttgagctcgccaaaaaagatgaaaacaactactaccatcgtttcactaaatttagtaaggatgaagctttatctttagcacaaaaaacctggcgtgatatcaatttagttaacctggaaaattatatcgaacctacacgaagtcgagctgaactgattcttcacaagggagacaatcataaaatcgacttcatccacttaaaaaaatagaaaaagcttgccaaggggcctaaaataacgtataatgacatagttagataaattttggaggtgaaaacattggcaaatattaaatcagctatcaaacgcgctgaacttaacgttaaacaaaacgaaaaaaactcagctcaaaaatcagctttgcgtactgctattaaagcattcaacgctaacccaactgaagaagcttaccgtgctgcatcagctagcatcgataaagccgcttctaaaggtttgattcataaaaacaaagcaagccgcgataaatcacgtcttgcagctaaattggctaactaattgaaagctccatttaggagtttttttattacctaaaaaacctgctagcttatctcctagcaggttttctttattaattaaactccggtaatcttaacttcaaaaatcgttccctttggttgattatctttaacaacaattgttcctttaagggctaaaacaatttgttgcgctagggataagccaagtccaaacccacctttttgtctggttctagccttatctacgcgataaaatcgatcaaagatttttttcttatcactatctgatattccaggaccattatcagctacagaaatataaagatggcggtcattagtgcgaacagtaaaggtaacatgtccgtcatcttccgtatatttaatagcattatcaaataaaatagtcattaactgtttcaatagcgttttatcagtttggattggacgactaacttggttttgacccgtgaaacctttctcattttcttctgcaatcatggcatagttggtaaatactgtatcaaagaaagcaggttctaaggtttcgatttctggtttaataccatcgtcacgacgagccaagttcaagagattagtcgtcaaaagacgcatattacgtacttcgtcaagacttgaagcaatattctctgaattatctaaaatagtgctctcaggcttgcggaaaagaacttctaacctgttttgaatcacagcaagtggtgtccgtaactcatgactagcattttcaacaaaagctttctgcttctccaagctttcctgaataggacgtcttgaccacttggccaaatacatactagccgcaacagataagagccagaagaaactcatcatgatgacaattagcttaacataacgttcagtagcttcttccaattgagttgtattaatcgcaataacaaggtacttagcatcaggatagagactattgtctactttctcagtgatcaggcgatacttttccgtttgatcgaaataattctgagaacttcccttgctgataacatcaatgttatttttatctattggtaaattggataagcttgaaaatttatcaacgacattgaggacttttccattcttatcaagcactaagacactggtgtttgccgcaacagataaatcgtgaggggcatcttcaatttttgatttcttcttaggttcttttttagagccactcgagtcaggtgtttcagctgtcgactctttagtatcataggcttggtaaatggttgtcgtattattttgatccacctcagaagtcagaaaaagttcccgttttagcatttccatttctaaataagaattggtcttagtggctgccattttcagactagagtccacattggaataaacgccataactcagaatctgcaaaatcatgacagtcatgataaggaaaataccagaaaaagtagcaaagaaatgaatgaacgacttaaatccgtctgacttgattctcctaaagagataattgaaaaatttagtcagcattcttcaaaatataccccacacttctcaaggtttggagattggcagcaaagtctgttcctttaagtttcttacgaattttagaaacataaacctctacaactgatactgtggtatcactatcaaatccccaaagacgatcaaaaatttgtgacttaggcaagatgacattttgattttgtaagaagtaaactaataaatcaaactctttaccaagaagttctacttctttatcccccacaaaggttgaatttgtagcaagattgacacgaacatctccaaaagaaagtgtgttttgatcaaatttaccagagcgtttcaaaagtgcttgaatacgcatcttcaactcttctaaatagaaaggtttggttagatagtcatctgcccccagttcaaagccgtgccccttatcgtctagactttccttagccgtcatgataagtacaggagttgttacacctttttcacgtaattctctaagaacagtgaaaccatctttttcaggcaacataaggtctaaaagaatcaaatcatagacgccactttcagcttcgtaaaggccttcatcaccatcaaagacttgcatcacatcagcaaagtcatctaaaaaatcaaaaactgagttcgacaaactcaaatcatcttctactagtagtattttaatcatagttatcccccttgttaggtgtcaaagatacaaataacactttgactaagttttatcattatatctaaaatagacgtaatcatctagtgctttgatcttcttttatttagatttagtctactaaactttccttaagcttttcataactgaaacgaaaaaacagcaccaataggtactgttttgtatcgatatttcttcttagaacaaaccaacagctgttccgtcttcagctacgtccatcttgagggctgctggtgcttttggaagaccaggcatagtcatgacatctcctgtcagagctacgataaatccagcacctgttttaggaacaaattcgcggatagtgatatcaaagccttctggtgctccaagtaagaattggttatcagagaagctgtattgtgttttggccatacatactggcaaattatcccaaccaaattctgcaaactgtttgagttggttcttagcttttttctcaaagataactgatttaccaccatagatttctgtaacaatcttagtaattttttcttccaagctatcgtcatcagaatagagacgtttgtagtcggcattaccattttcaacagcatcaactactgcgttggcaaggtcaataccaccatcagcaccattagcccaaacgctagccaattcaacaggaacatcgatttctgcacaaagttctttaagggctgcaatttcagcttctgtatcagcaacaaactcgttaatagcaacgactgctggaagaccaaatttacgaacgttttctacatgacgtttcaagtttgcgaagccatcacgaacggcctgaacattttcttcagagaggtcagttttggctaccccaccgtgcattttaagggcacgaagtgtcgcaacaataacaacagcatcaggagttgttgggaggtttggtgtcttgatatcaaggaatttttcagcaccaaggtcagcaccaaaacctgcttcagtaatcgtataatcagccaaacgaagagctgtagctgtagctagaaccgagttacatccgtgagcgatgttggcaaatggaccaccgtgtaccaaggctggtgtcccataaattgtctgtaccaagtttggtttgatggcatctttaagaataagggtaagcgcaccttcaatttcaagatcacgtacataaactggtgtacggtcataacggtaggcaactacaatgttagccaaacgttctttaaggtcattaatatcagtagccaagcaaagaatcgccatgatttcagacgcaacagtaatatcaaaaccatcttcacgtggaataccattaagtggtccgccaagaccaacgtttacatgacgaagcgcacggtcattaaggtcaaccacacgtttccaaatgatacgacgttggtcaatgccgagagcatttccttggtggatatgattgtcaagaagggctgacaaagcattatttgctgtagtaatagcgtgcatatcccctgtgaagtggaggttgatatcttccatcggaagcacttgagcgtaaccaccacctgcagcaccacctttgattcccataaccggaccaagtgatggttcacgaagggcaatcattgttttcttaccaattttgttaagagcgtctgcaagaccaattgacatggttgatttcccttcaccagctggtgttgggttgatagctgtcaccaaaatcaatttccctggtttattgtctttgactgcattgattttatcaaatgacaattttgccttgtattttccgtagagttccaaatcgtcaaagccgattccaactttttcaactacttctgtgattggttttaattctacactttgagcaatttcgatatctgttttcatgagacactcctctatatttttctagaatctattatatcagagtttaataaaaaacgcattatttttggttaattacttttcaatgttcggtttttgttttgttataaatcgttataactttaatttataggggtacaccccaaaaatacctactatatatttactaaagactcaatttttagtacaatactactatgaaaattttgattacatcgggtggtaccactgaaaagattgatgctgtacgtggaatcacaaaccattcaacaggttatctaggaaaggaaatcgctgaacttttcttgtctaagggtcaccaagtaaccttagtaacaaccaagacagcggttaaaccagaaccgaaagaaaatctaaagattacagaaattacgaacgtagaaagtcttctcaaaaaaatggagccactcgtcaaagagcacgatgttcttatacatagtatggcagtctctgattatactcctatttatatgacggatttcgctgaattggaggacaccgaagatctcgctcaattcttgcataagtctaacactgaaagcaagatatcatcggcttctgattatcaggttctttttcttaaaaaaacaccgaaggtcattagccttgtcaaacaatggaatcctgatattcaattgattggcttcaaacttttggttaatgtaagtaaagaagagctttttgaggttgctcgtgcaagtctgaaacgcaatcaagctgatattattgttgccaacgacttgagtgatattactccagatcagcatattgcctatcttgttgacgaaaaaaacgaggagaaagttacgactaaatctgcaattgctcaagctttatttgaaaggatatgccatgactaaacgtatcatccttgctgtttcaggatcaatatccgcctataaagcagctgatctaacaagcaggttaaagaaaaaaggttatgacgttcacgtcattatgactgaagctgctcaagcctttatcacccctctgacacttcaagtcctttcgaagaatcctgttcacactgatgtcatggaagaaaaatcggctgaacgtattaatcatattgatttaggtaaagaagctgacctctttattgtatctcctgcttcagcaaataccattgcaaaattagcacatggtctagccgataatatgcttactgctactgctttagctttacctagcaccacacctaaactaattgcccctgcaatgaatacgaaaatgtatgaaaatccactgactaagaagaatttagatactttgcatgaccttggctaccaagaaattcttccaaaatcaggtttactggcttgtggggatacaggacgcggtgccttagctgatatcgatgacattattgaatccattgacaatgttttaacaaaatagccttgcatagaataaaaaggagtttatgatgaataagaaaaataaagcaaaccaaacggctcagttatccctcttgatagctacaatggttgtaatcgaagtactcagtcaaaccatctttgctgcttttgtacttccaatcaaaccaaccctaacccatatcccagttattatcgctagcatcgtctacggtcctaaaattggagcttatttgggtggcttcatgggaattatgagtattattcgaaacactgttatctatacggttagtagctatctctttagtccttttgttgaagggggaacttgggcatctgcagtcattgccatcgttcctcgtatcctaatcggtattttcccttactttatctacaaattacttcaaaaccgtctaggtctgactttatctggggttttaggtgctttcacaaatacatttttcgtacttcttggcatctacttcctaatccctaacttctacacagcaggtggcaaaacactgatggcaaccattttcacaacaaattcgattgctgaaatgattattgctggacttttgacagtaagtatcactcctatgcttttacgattgaaaaagtaaatcatttaatctatggatagtgccaaaaatcagatactattctataaactgttaaggagaatttttatgaaaaaatcaaccgctattgcaagaattgccatcttttttgcagtaatgctcaccattcattttgtaacttccttcattctcgaatttgttccgtctggtattcaaccgaccttagttcatattcctgttgttatcgcttccgtcatttatggacctagaatcggagctattttgggactcctcatgggcctctttagtgtgaccatgaatacattggttttgacgccagcaagtttcctctttagtccctttgtctcacatggaaatctctattctctcattattgcactgtttccacgtattttaatcggagtgactccttacttcgtctatcgatggctacacaatcgtactggtttagtgacagctgctattgtcgggtctatgaccaataccatttttgttctattgggaatttatatcttcttcggtaacatctatggtggtagttttcaacattttcttgctttaattttgacaacaaactctcttattgaagttattgctacagttcttgtcacaactgcagccgttccgacacttgaaagattaaaataattagttaggtcgagactgatatgtcttggctcttttattttcatttacattttagataccattttctttttaaaaagatttacaattatcgctagaattttctgaaaaaatttgttataatgtaagcggttaaaaatataaaggagattgctatgtcttacactgaaaattatcaaaaatggctcgacttcgctgaattgcctgcttaccttcatgatgagttggtcgcaatggatgaaaaaacgaaagaagatgccttctataccaaccttgaattcggtacagctggtatgcgtggattgattggtgctggtactaaccgcattaacatttacgttgttcgccaagcaactgaaggtttggcccaattgattgactcaaaaggggaagaagctaaaaaacgtggtgttgctatcgcttacgatagccgtcacttctctccagagtttgcttttgaatctgctcaagttttggctgctcacggtatcaaatcttatgtatttgaaagcctacgtccaacacctgaattgtcatttgctgttcgtcatctccacacatttgctggtatcatggtaacagctagccacaaccctgctccatttaatggatacaaggtttatggtgaagacggtggacaaatgccacctgcagatgctgatgctttgacagattacatccgtgctatcgaaaatcctttcactgtgcaattggctgaccttgaagaaagcaaagctagcggcttgattgaagttatcggtgaaaacgtcgacgctgaatacttgaaagaagtgaaaggcgttaacattaaccaagacttgatcaatgaatacggtcgtgacatgaagattgtctacactccacttcatggtactggtgaaatgttggcacgtcgtgctcttgcgcaagctggatttgaagctgttcaagttgttgaagctcaagctgttccagatgctgacttctcaactgttaaatctccaaaccctgaaaaccaagaagcatttgctcttgctgaagaacttggtcgcaaagtagacgctgatgtattggttgcaactgatcccgatgctgaccgtcttggtgttgaaattcgtcaaccagatggttcttacctcaacctttctggtaaccaaatcggagctatcattgctaaatacattcttgaagctcacaaaacagctggtacacttcctgccaatgctgccctctgtaaatcaatcgtatcaactgagttggttactaagattgcagaaagctacggcgcaacgatgtttaacgtcttgactggtttcaaatttatcggtgagaaaatccatgaatttgaaacacaacacaaccacacttacatgcttggtttcgaagaaagcttcggttacctcatcaaaccattcgtacgtgacaaagacgctatccaagctgttcttatcgttgctgaaatcgcagcttactaccgctcacgtggcatgactttggcagatggtatcgaagaaatctacaaacaatacggctacttcgcagaaaaaacaatctctgttaccctctcaggtgttgacggagctgctgaaatcaagaaaatcatggataaattccgtggtaatgctcctaaacaattcaacaacacagacattgctaagacagaagacttcttggaacaaacagctactactgctgacggcgttgaaaaattgacaactcctccaagtaacgtgcttaaatacatcttggctgatgattcatggtttgccgttcgtccttcaggtacagaaccaaaaatcaaattctacatcgctacagttggtgaatctgaagcagatgctaaagaaaaaattgctaatatcgaagcagaaatcaatgctttcgtaggcgaataatatttaagacttagagctaagctctaagtcttttttatacacgacaatactaggattgtaagcaagtcacccattttactactcgaaacaagcaaccacctatagactaatctataggtggtagttttatgatttaattatagagcgctaacttgtgaatgatgcttaaacaaggaatgagtagctccatgaatatgacgagcggtctctgcattattcatggtgtagaggtgaacgcctgcaacatcttgcgtaacaagatcgacaatctggtcaatagcataggcaagacctgccgctctaagtgactcaggatcatgctcatacttatccaaaatggcacggaacttacgtggtaaatggatattctcacaagtcttaagcaaacgtagggcttggttacgattcaaaataggcataatacccgcatgaattggtacatcaattccagccaaggtacatttatcttgaaaatcatagaaacgttcattgtcaaagaagagttgagttacaaggctagaacaacctgcatcaacctttttcttaaggttttggatatcagagatttgatttggcgaatctggatgcccttcaggatagcaggcaccgatgatatcaaattgaggagcttcttccttaataaactcaatcaaatcagtggcatatctaaagtctttaagaggttccacaccaggaatgatatcaccacgtagggctaagatacggtgtacaccaacagcatccaagtcacgtaaggtatcagcaaccttttctttactcaaatagatagccggaaggtgggcaatcgttgggatggctaggtcattttgaatatgatctgccaaaggaaccgtcgtctctttgatattatatttgttattactagctgtcacactgataaagtgtggagccaatccttgcatatcctcaagggcacgtagaattttttcgttacctactgcagggttaggtggaaagacttcaaaagagagtgatggtgtttggcttgtcatattttataccttcttctttttagatttttgttaagacaaaagctgttttaagtgcctattgacttcataagtacagttaaacacgtgttaatcatagcctgcttgcaaaaatctttagaaaattatttgctattgaaaaccttctacacttaaggaagaaggtcttcaacgtatgataacttctgcttacaagttttcgcgagctgcttttgcagcttctacaagcttgatcaagctttctttagtttctttgattccgcgagtcttcaaaccacagtcagggttgatccatactttaccgcttggtactttagccaagattgcttcgatagtgtggtcaatttcaccgtcttgtgggacacgtggtgagtggatatcgtaaaccccaggtccaacttctgtttggaagttttgagctttaagttcatccaagatttcaagatttgaacggctagcttcaaatgagataacgtcagcatctaagttatcgatagctgggatgatatctgtaaattctgagtaacacatgtgagtgtggatttgtgtgtctggtgctacagttgagtgtaccaaacggaaggctggaattgcccagtcgaggtagtcttcataccagtcactacgacggagcggcaatttttcgcgaagagcagcttcgtcaatttggataattttcacgcctgcagcttcaaggtcaagaacttcatctttgattgcaagagcaatttgaagagttgaatccttgatagagatatcttcacgtgggaatgaccagttaaggatagtaacaggtccagtcaacatacctttaacaggtttgtctgtacggctttgtgcgtagctagaccatttcacagtgattgggttaagacgagtcacatcaccccagatgattggtggtttaaccccacgcataccgtatgattgaacccaaccatttttagagaagaggtaacctgacaagttttgaccaaagtattcaaccatgtcgttacgttcgaattcaccgtgtacaagcacatcaaatccaacttcttcttgccatttaatccattcatcagtgatttcagcaaggaaagcatcgtattcttcttgtgacaattcattcttacggaaagccaaacgtttcgcacgaacttccttagtttgagggaatgaaccgatagttgttgttggaagcaatggaagtttgaaagcatctttttgaatcgcttcacgttctgcaaatgctggcaaacgagtataatcagcttcagtcaaccctgcaatacgagcacgaagttcagcattttcaccaacacgctcagtcgcaaagagttctttgttagcagcaagggcttcttcaccttgaccattgcggatagcatccaaatcacgcaattcgtccaatttttcaactgcaaaagcaaagtggttcaaaatagctggttcaaattcttcattagcagttgtaaatggcacatgaagaagtgagcaagatgttgtcaaaacaacattttcagctggcacttgttcaagaattgcaagactcttctcgtagttgttacgccagatgtttttaccattgacgataccggcatagagagtcttatcagctgggaaaccacctttaaccaattcaagtgttttcttaccttcaacaaagtcaagaccaataccatcaactggcaagttcacaagatcattgtagacatcacgaacatcaccaaagtaagtttggatcaagacttcaagaccttttttatcagccaagagtttgttgtagagattcaagaagagagctttttcttcagctgtcaaatctttaacaagggctggctcatcgagttggatacgagtcgcaccaagctctgccaattttgcaaagacttcttggtaagctgccacaaagctgtctacaaagtcttctgctttcacaccgtcctcaaagtcagataattgaaggaaagtgaatggtccaacgacaactggacgtgtgttaagtcccaattctttagcttcttggtactcatcaaaaatcttgtgaccagcaagtttaacttctgttgttttttcaaatttaggaacgatgtaatggtagttagtgttaaaccattttttcataggaagggcacgtacatcccctttttcaccttggtaaccacgcgccaaagcaaagtaacgttcaagatctgtcaaattcaagttctgaacagattcaggtacgacgttgaaaaggaaagctgcatcaaggaagttatcgtaatgtgaaaaatcatttgaaggaatttcactaatacctttctctttaacaatattccagtgttttgcacgcaagtctttggctgctgttaaaagttcatctgcagtaatttcatttctaaagtatttttctgttgtaaattttaattcgcggaattcacccaaacgtgggaaaccaatgatagtagttgacatcttgtgtcctcctctttgttgttgaacttatcttaccaaagaaatgggtggctgtataattgctattagttttctctatatatagttttagactataacctataaaacaaagggtttccagctcccgttatctccttttgtttagatattgttatagctaataactatatataaacctgataaatccttttttataacaaaaaatccctagacttttgtctagagactctattatttactaggattagtatactaagctctataggtgctcagtacttgctcttgaagccaagatgatgtataagacatattttcactattgtaactattccaaataaaataaccaaaaactaccaatactaataagaaacaaattcctaatacggctaaccaaatgatttgtttctttaagctatcatactcactcatatagccattatggattttaatgagttcatttcttcttttgttacttgactctttagcaatggcaatttctagctcatacatttgatgcttccatgaattcttagaagtgccttttttcattttatggtttgaaagactgctgttgcctttctcaaagttatttttttcagtcatatttccctctaaaatcttcttttagtccctatcattataacatatgtaaaactatctgaaaagttcatttttggttagaattttgagaaagagaattaaaacatgaaaaagaaccagagggaaacttcttatgttatactctaagtatgcataagaaaactgttattgattttaaagaacttggtgtcagacaaatttttacagacgccattaaagaactaaaaacaaagaacattaaggaagttaagcatctcttagctgaagtcgaagcctatcaaaataagggctattatgcagtaggttatctttcctatgaagctgcccctgccttcgagacaaaatttcaggttattgatggtccattaatgtctgagtatctcctctacttcactattcatgaaacttttcaaacagagcctattccacttgcctatgaggcaattgccctaccagaatcttggcaagagctaacttctgcagaggaatacaaggctgctattgagcaaatacaccaccatattcgacaaggtgatacttatcaagtcaattatactgttcaactccaacagaagctgacagctgatccctttgccatctataaccgattggttgttgagcaaaatgcacattacaatgcctttattcagcacgatgatgtttctatcatttccataagcccagaactcttctttaaaaaagatggtgatagactgaccactcgtccaatgaaaggtaccaccaatcgtggtttaacaactgaaactgacctcaaacaagcccattggctagctcaggatcagaaaaatcgctctgaaaatatgatgattgtcgatctacttagaaatgacatgaatcgtatttcaaaaataggaagtgaagatgtcaagagcctttgccaagttgaacaatactctacggtttggcaaatgacttcaactattgagacgcaactcctaccaaatagtcgtttaaatgatgtcttccaagccctttttccatgcggatcgattacaggtgccccaaaaatagcaaccatggagattattaagaaggttgaaaaacagcctcgaggtgtttattgtggagctattggtatcttggtgccacagggacctagtatttttaacgtggccattcggacactacaaatggaaggaaccaaggctatctatggtgtcggaggaggtattacctgggacagcaactgggaagctgaatatgaagaaacaaagcaaaaaactgctgttctataccgtcagaaccccaaattcgatctcatttcaactgctcgtgtccaccaaggaaaactgctatttcttgaggagcatatgaaacgcttgcaagagagtagtcgctactttgactatcctttcaatgcagaaaaagctcactatcaagtcgaagctctgtgccaatcactagactttgacaaagattaccgtcttaaaatgtcacttgcaaaagatggtgaactgaagtttgaacatacccaattaacaaacttatccaatgacttctgccaagcaaggttagttgagcaaaggcatccgttggatagcccctataccttcttcaaaacaagttaccgtcctcaccttagtatcgaacctcacgaacaaatctattataatcatgaggggcaactcctagaaacctctatcggtaacattgtgcttaaaatcgaggaccaactctacacaccacccgttcacctcggcctcttaaatggcatctacagacaaagcctaattgctgataataagcttaaagaaaaagtcttgaccgtaaaagatatggaacaggctcaggccatctacggatgcaatgcggtgagaggcttgtatgaattgaaggtggaaggatataattatatttaacgaaaaaatacaagttttttgttctcccctactcttgctaaagacaaaagaaacttcaatattctattggtaaaaaatcaacaatttaatagtaaaataaagtataatacttactgatagttattcagttatcgtgactgtaatgataagctttttggcttataatttactagccttaaaattcagtaataatttagaaaggatacaaaccttaaatgaaaaaatttaaaggcttgacttctgctgaagttcaagcaagtaaaaacgcccatggcgataataggctctctagtaaagaggctaactcgctcctctcaatctttatcgaagccttccaagatcaatggattcttatcctcttggctgccttaggattaaaaatcatcttcaactttgttggaatgattttccctgctattggtgaagccaactggtatgaggctatctcactaattttcgccattttgatgtctacaggattctcagcagtctcacaataccgaaatgagcaaaaattcaacactcttcaagaagaggcttcaaaaactaatgctaaggtttatcgtgatggtaaacttaaagaagttcttgttgatgatattgtaaaaggtgatcaaattctccttcaatcaggggacaagattccagttgacggtatcatactggaaggtgagttaaaagtaaaccaagctgtccttaatggtgaaagtgaagatgctaagaaacttcctcttggtgatcaagcagaaccagactcttccgacctctttacagagctcaaagtcttccgtggtacagttgttacttcaggtgaagccgttatggaagctacacaaattggtgataatactgttctaggaagcatcaatacttctcttcaagaagatagtaaagattcaccatccaaagaaaaactcaacaagcttgctggaaacatcggtgtcctcggttatagtgcaggtgctgcatattcagtaatcaaccttgttttaggctttattgccctcaataaggctaataacctcaatggtggttcaatcttccttcttatcattgaaacgattctctttgcggttacaatcatcatcatggccgttccagaaggtcttccgatgatgttggcactcgtttcttcaatgaactcaggacgacttttagctcaaaatatcctggttcgccatcctgataccattgaaacagccggatacatgaatatcctcttcagtgataagactggtactatcactgaaggtaaactatctgtagttgacttcttccttgctgatggaacactttatgcagctactggtgaaactgaggctcctgattttgacactatgtcagatagccttaaagctgaaatgattaatggtatcggtcttaataacgacgccatggtagctgatggcagtgctgttggtagtaacgccactgaccgtgcacttcttgatttccttattggtcgttctcaacttgattttgatacaaatacaattactgagaagcaacaattcaactcagcaacaaaattcgcaagtgtaacgactaaggacggaaaaacttacatcaagggtgctccagaattcatcctaaatgactgctactactatcttgataaagatggtaataaacaaaactttacagatgatattaaagctcgtttccaagaattatcattggaacaagctaaccgttcaatgcgtttacttgctatcctcaatacagatggtaatgataaagtcttgattggtatcgtatgtatccgtgataacgttcgttcttcaatcaaacaaactgttgaaacaatgaaccgtgcaggtgttcaagtagttatggtaactggtgaccgtaaagaaaccgctgttgctatcgctaaagaagccggtatcgttactggtcaaaatgaccttgttcttactcacgatgaactttctgccctttcagatcaagaacttaaacaacaattgcctcacttaaaagtggtcagtcgtgcccttccaatggataaaaaacgtcttattgaggcagctcaagacctcgatatggtcgctggtatgacgggtgatggggtcaatgactcacctgccctcaaatcagctgatgtcggattctcaatgggtgatggtactgaagtcgcacgtgaagcctcagatatcgttatcttgaataactcattgacttcgattgagaaagccgtcctctatggacgtactatgagtaagtcagtaagtaaattcattatcttccagttaaccgtaaacgtgactacaattgctatgtcacttctctcaccactcttgggcctcaaagaaccatttacaattatccaaattctctggattaaccttatcatggacacacttgctgcccttgcctttggtgaagagcctaccctagatcgttacatgaatgaaaagccagttgctaagaaggcaaatattctcactggttatatgaaatctgctatcggtgtagccagcgtcttcattactcttgtatgtttagctattcttaaaaatgttggtggtatccaagactttatcacaaatggaactggcaactttgaaatggtaacaacattcacctttacagtatttatctatgctgtcattttcaactcacttaatacacgtagtaatggattcaatatttttgaacatatcggcgaaaacaagaaattctcaattgtaatgatttctattgctgtcgttcaaaccttgattattcaattcggtggaaaagtatttagtaccgttccaatggacgttcaacactatatcgttgctcttcttatcgcggttttaattatccctgcagatttaattcgaaaagctctaactaaaaacaaataactatctgtttaacatattataaaactttacaaggataaaaaggattgggagttatcccaatcctttttaataatttccgaaggtaataccgtggaaagatcataacataaaaaggctttaacaagcctttttgatttattaagtaatgctacttaaactgactaggagcccctgtataacctgcccaatccttactataaaagcggtcgttcaagttatagctaggtgcgggtgttggattacttacaaatggatcaacagccttgtcaaaggccacccaacctttccatcccatatgaatggtatcttgcatgaagtaaggttgatctccatcttttgagaagtcagcaatattggtgaagccttgattttccaattgataacggattttagaaaccgtagcgtcatacatttcttgacttagtcccgtataagccatccacttgctattaacaggtgggatgacaaagataacgttagtatttgacttcgcaaattgatttaagactaactgtaggtcaccgtattcttgtgaaacttcatacgaaagattcttttggaaacctttaagtttaccaatctttttagccaaacgtttcttatagaaacggtcatcgataccaaagtcgtttgacttggtatgagcttctgcatctcttacggcaacctggtcaagtgcctcgtaagagaacttgtctggcaactctttaagataaggaagaaccttcttgtcgtaatttgcattatttgatgctgcaaaaggactgaacaaggcatcttctcgcttattaagctctgccataaattgaatataagtcttatcaagagaatttaaatcttgcccattagccactttagaaagttgagatttcatagtaatctcaggtttcatctctaagatgcgctgagctgcatactgagaatttgcatccgtctgattttgacttaagaaactactaagttggtcgttattgtaaaactgctggaaagccgcagaattgtaaccttttttagtaaaccactgtggtgacaagacatagactgctgtcccattttttaattcaggaagcatttgttgcattcccaaatattggtttagagaggcagccccacgttgtccaataaaatatgggcgatagttacggtcgtatttttcagctaaaacagctggatgaagggcatcaaaacgcaaccactcactagacccaaagaaagggacaaatcgatgattcttatcagaaagagctgtcgtcttattaatacggctcttaaagttctcagttgtcaaggttaccgcgttacgtttttcaacctcataactatgttttctgccttgagggtaggaaaaaataactactactaccaatactaaggcacagattatagggccaaaaatttgccataaacgcttaagcattgcgaagctccgttaccccttcaacaatcttattagctgtgttccagtcatcacgaccaaattctgaaactggcacacgaatatcgaaacgtgattccaattcaacgataagctcaactgttcccatagaatcaagaacaccagcatcgaaaaggtcttcatccatcatgtctgaaacatcttccatgaagagttcatcaataatttcaataacttctgattttacatccatttttataattcctttacttattttttagtgaaccagaggtcattcaagaatccagagaaaatcaagaatgacaacataacagtgttaaatgtaataaagattcccaaagccttcgtccatttattttcaggaagtggctcaagaccagctttcttacgttctttattaatggtcttcttcttacgtaaccaggcatcattaattcctagaccaataccatggaaaataccataagcaatgtaataccaggtaactccatgccagaatcccataaccatcatattaatgacataggccacatttgatgtcgtgtttcggtttttgaaaaccttgtttcgcatcaaaaccataaccaaacgcataaagacaaagtcacggaaccagaaagacaagctcatatgccaacgattccaaaattctttcaagtctcgtgagatgaaaggtttgtcaaagttgattgggctcttaatccccatgaggtttgatgctgccaaggcaaacatcgagtaacccgcaaagtcaaagaagagatcaagaccgaaaacatacatgacaccaagtgttggtaaattaaagataccaccttgagccaaagcttgtgctttcagtgaaggcaagagcatacttccgaaaatctgagccaaaacaaacttatagaggaaaccaagcatgatatattttacagcttgctccaacatattcatcaactcgtctcgctcaggaatcgctttgtaatcttcgttaaagcgtttgaagcgatcaataggaccactcgtaaaggttggcataaagagcatgaatcggaggaattctccaagtgtaaactcttttaagacaccatcccgcatctcgataatcataccaactgatcggaaggtcaagtaagaaataccaagaaagtttaagagcgactgagtaccatttatcgcaggctctaccttaacaaaaatcaaaggaaggactacaagaaatgagtgtaaatagaaaacccatttattgtccttgttactgcggtaatatttgtaggaataaacccagatgatttgccaaacgatatagaagagtaaggctagtaattggctagcatgtgttcctgtcagagcgagaacaataaaggctagacttaccaaacactcataaatcgcaaaacgctttttaaagaagagacccacaaagattggcaatagagctaatccaagatagataaaatagaaggggttaccgtaggcttctaaatgggggagctgtttcaagaagtcaatcatcggttgttaacctcactgataagacccttgatatcaattttcccatttggtgttaaaggcaagctctcacgatagaggaacttagtaggcatcatgtaagacatcatgatatcttctaagtcagccttaatcgccttggtgatatcaatttcacgttcaaactgctcacgaacaccatccttaagaatcacataagccaagagattctgaaccttatggtctttattgtaacgtggcacagctactgctgaatcaatatacttagacttattaaggttttgtgaaacatcctctagctcaatacggaaaccattaaatttaatctggaagtccatacgaccaccgtaaagaaggagaccttcatcagtcatcgttcctacatcaccagtatggtaagcaggtaggccattaaactcgaagaaggcttccgcagtcttttcaggattgttcatatatccttttgaaactgctggtcctgatacgatgatttcaccttgttgaccatttggaaggatattgccatcctcatcgataatataagtcggtgaatcttccttggtataaccaattggcaaacgcttaaggttagccagcatctcatcagttactgctactgctgataaggctacagttgcttcagttggtccgtaagcattaataatacgtgcttctgggaaacgttggcgaagcttttgagcagtcttgacagtcaactcttctccgtcaaaatagaaatgcgtaatttctggcatcttctctgcattgaagtcttcagacaacattgccatatctgcaaaagatggtgttgatgtccaaatagcaattggaagtgagaagatcgtttcaaagagcttcttgaagtcctgtgtaatggctgaaggaagcgcatagagtgttcctccaagtgccagtgtaggtgcccagtacattactgacaagtcaaatgaatagggcggttgagccagcatttgaggacgttttggagttgcaaattccttgtccgtaatcatccagttagtgaaactaaggagattattgtgtgaaatttggacccctttaggcttacctgtagttcctgaggtaaagatgatgtaataagtatcatctcccttaacaggatgagtcacttcgtagctagtcttgctttcaaaagctgttgtcacttggtccaatgttaagattggagcttggacatcctcaagtgggaagtcattgatagcaataatcagactaggctctgctacttcaacgatagccgtcacgcgctcaagagctgagtgactatcaattggaatataagcgtgaccagatttagtcaaagcgacaaaagttgccaacatttcatactcttgcccgccataaaccacaacaggtgatttttctggaatatcaagactatcaatcttagctgccaagctatccgagtcagcttttaagtcaccgtaagtgtgaacttcccctaaaatattgtaaacaggaaagtcaggttgtgattgagcaaactgctcaatcgtttcaatcatatctttaatttttgtattcgtcattattcttcctaaaattcgttatagataaaattaccttgaccttgtcctaggtaattgtagagataaattagggccataaaaatggcgaaataaagcaaggtttgtcctaaaaataccaggacgtttttatgttttaacattctaattttcgatacctttttttatataatatcctctttagtttaccatcttatcgccattttttccaataaaaaagaaaaaataactaaatttcatttctttttcatcaatagtttttagtgataaatggttagctaaaatgataaagtcaaaaccacccgtgagaacgggtggcttgctcttcggctgaaagcctctgctaccggccgaggcctaaaggcctaccgaatggtttcccttcagcaccacctttgctagctgacccgtctagcgggtctctttaagactactttcttttattcttctcacctgtaaacggattatactcctcaaatagactaaactgatttgctatcacgtcttcttgtaattgattacgaatatattcttcaattcgcttctgatttcgtccaacagtatcaacataaaagcctcgacaccaaaatttgcgattcccatatttatactttaaattagcgtgtcggtcgaagatcattaagctacttttaccttttaaatatcccataaatgaagaaatacttagtttcggtggtatactcactaacatgtgaatatgatctgggcaagcttctgcttcatgaatttcaacgccttttctttcacataataaccgtaagatttgaccaatacttgctttgtatttcccatagattatctgacgtctatattttggagcgaaaacaatatgatacttacaattccatgtagtatgtgctaaactattattatcctgtctcatcaggggtcctccttttgtatattagttagtggtcgggaaaccttatctaatataacactttagggggacttttttgatacatcgctaaaagcttttcggaaccactagcacagctagtggttttcgtgagacaaaaaaacagagcttaaaagctctgtcggatttaactattttgtgtcttttgggccgtctgcatacgatagtacattcccttagcttgcatcagttgttcatgggttccgtgttcaacgatatctccattattcatgaccaaaataaggtccgcattttcgatggtagacaatcgatgagcaatgatgaaacttgttctacctttcattaatttagcgaaggcctcttgaatgaggagctctgtacgggtatcgatactagaagtggcttcatccaagattaagattttaggcacattgacaaatatgcgagcaatggtcaaaagctgacgttgcccctgagaaagggattgccccgcatcattcaagtaggtgtcgtagccttgaggcaactgctgaataaagaaatctgcattggcagccttggccgctgctatgacttcttcacgactggcttctggattaccataggcaatattatcatgaatagtgccaacctcaagccaagtttcctgcaagaccatcccaatctgtttccgaagactctcacgagtataatctgtaataggtctaccgtctagtaaaatttgacccttgtccaaatcatagaaacgcatgagcaggttaatgagggtagatttgcctgctcctgtagggccaacaatggcaacagtacttgccgcaggtatatcaatgctcaaatcctttataagaggtttattaggcaaataaccaaattgaacatgctcaaattgaaaatgtccctgaacatctgcttcttctaaaatcgcattacccgtttctggtatttcatcttcatctaaaatcatataaaggcgatcagcacaggccaaagcactttgaagttcagatagaacagatgaaatatcattaaaaggtttcgtatactgagtcacataatttaggaaggtagtcaattgtcccactgtaaaagcaccacctgacatgattcgataggccccaacacctgcaataagagcatagatcagactattgacaaaacgtgtagctgggttaaccgctgacgaataaaagatagcaccctgtgaataatcagcatacttaccattgacgtctttaaaactcctaaccatctggtcttgagcatttagactttgtactaaagcttcttgagtcagactttcctcaatcaactgagtctgcacacctcgccatttagtttgattgcgatagagttgatagctcttctttgcgataaaacgtgccacaagcattgacagaggcgtcatcactagaactaagagcatcatgaaccagtctaaccgagccatggtaatgattatgacaaagatagtcaaaagcccaacgaaaaattggttaaagaccatgagaagtccgttgtttaactgatcgctatctgtagtcacacggctaaccatgtctccagttccttgacgatcaaggtaactaagtggcatagcatgaattttcatcatgactcgttcacgtaaactttcgctatatgaataaattaatcgattataaatcaaagggttaagccactggattgcactattagctaagataactacaagcatctgccaaattaaacgtgacatcaatagaacggcgttcatcttaagaacagcgtccactgcatcaccaattaagataggtaagtaaaccgttaaggcaacttgaataatggtcccaacagttgctaaggcaaagaggtagcgctgacttaagatatctctacttaaacgtttaagcgttgatttattatttctagccttcatcagcgacctccttttgatgttgagaataatgaatgtcttgatagagtttatttgtggcaagcaattcttcatgattacccaagccaacttgatgtcccttatcaagcaccaaaatttgatcaacagcttttagactatttgttctttgcgaaataataatcagactcgttgatttaagattgtctctgatagccgctagtaagcgactttcagtcaagtaatctagggctgaggtggagtcatccaaaatcaagaatggtgctggtctcatcagcgcacgcgcaatagtcaaacgttgacgttgcccccccgaaaaattacggccaaatgactcaactggctcatctaaaccaaggtccttatcccttacaaaatcagcagcctgagccatgtcaagcgcatgccacagttcttgctcactcggttcgtggtcaagtcctaatgacaagtttgaacgaatggttcctctaaataactcagctttttgcgggacataggcaacccaagaacgccactctttaaggttctttggtgatttttgatctttgaaaatagctaataaaccaatctgaggctgatataagttcatgattaagttcaccaatgtcgatttacccgaacctgtaccaccaataatacctagtgactgaccttgagtaagactgacattaatctcttggagtgatggcgaactagctgtaggataggtaaaggtcatctgatcaatagctagcactgtggaagcctgactagaagttcggacttctaaaggtgcttcaatatcctcatcttggagttcaaaaatagcttgtacccgtttcgctgaaataaaactttgattcagattagtcaacatcatggccaatttaaggagctccgtcaaaatttgcaagagataattgaccagagcaatcagcataccttgagacaaaagaccagcttgaatttgcagatttccttgccaaaggatagcaatcaaggtcatattaacaaccaagaaagtcaaaggactaatgagacttgctattactcctgttttgagctgccacttcttcaagtctttattgacagtagtaaagttatctaattcacgctcactctgatcaaaagcccgaataaccctcataccttcaagttgttgacgcgtattggtaacaattgattcattaattactcgaatcttggcgtataaaggattgacgatgcgactagctagtacaataataagggtcaataccaagaccatgccaagaaaccaaagggtcaagcgtggactgattcggaatgccataataatggctcccgtcacgataatcggtgccctcaaaaagagcctcaaaaattgattgatgcccgtttggatttgaaaggtatcaccagtcaaacgtgtcaccaaacttgacgttccaatctcatcccgcttttcctttgataaacgcatgatcttcgcatacaaatcattggttaaacctcgggcatagccaactgctgctctggatgaaaaatactgtgctgaaatagcaacaacaaccccaataacggcaagtccgaacaagagaaaaatcatcataaacagatgattttggtctttatttggaatagttgtgtcgacaattccagcaatcactagagggaccaagagttcgaaactggcttcgattaatttaaaaacgggtcccaggatactgtctttgatgtatcctctaaaatacactaataatgctttcatttgtctttcctaagtttaacgtccttactcttagaggcgtgagaacatacgcatcaaaaagagattaaactgtacttccttagcgtagtaaatatttccgccatttgtataaagttttccgccaccatagtacatggcaaccggttggtaataggtgtatgtttgcccactggtgtttcctagactcggagcaacgacatttttagagtaagcctttgcgagttcgacggtgttcactccaccattatcagccacataatcgatataggccttaccaaaattataggcttgtactgctgtccaaggatccaccttatggtgggcagcttcttccagattttccgacagcaccgtcaccccttgacgaatactctcttttcgatctgttatggagttggtcacccctgtagaactttcactggactgcatcacgtcatctgtcttccccttggtttctgtgtagatcatagccagaaccaaatcgacattggttgtattatcaatgtcgtcctctgccaaaacctccttaaccatggattcataggttaagacatgttgaatattggcatggattcgatagcattggataactatgataaggactacgacaaaaaccgccagacgtcttatccatttaaacatattatttattgatgatatcctcgatatttttgatgagaatagagtaggtgccatcaggattttgaataaactcaacactatcagcatcctgatacacattattaggcacaattaactcaattccgttcgataacgataatttttgattctctaatttcttaatttgacgcgaatggtcaatatctgataccgagataggctcaggtatggcctctttgagctcatcaacgaaggtcaaacgagctgtcaaattattatcaaagagctggtctgccaatttttcaggtgataactcttggtcttcttccaaattattgaaaatagcagatttcatttttccttggaagttaaagtcatcctgattaaaattctcagcaatcttctgggcagtgtcttcaaccatcttaatcgatttcttgacagattgttcaggctggacttgcaacagattttcagagaaataattggcaaagcttccattatgcttgattcgcttttcaatcaaataatactgcttactactacgattgattaccaaagcttcatcaggtgtctgggccgcagaaggcaaattattttgtgacaattgaataggatgttggctatctcccaaagaatgaatcaaactatccttgagtgcaatacgcaagaaagcaaaatattcttgcccttctttgtcaaactgaataaagaccaaatcattggtcttttgatcttcagaaatgacaaattcttccttccaaagttgggcaatcttgactgagctttccatcaagtcatctcctagatgactgatgaaaacattctctgcatcgaaatagccacgtttagcctcatctgagaaaactttagagagtttctttcgaaaatactcatctaagcgtggcgttatttcaagaggcccctctgctaaaaccagctccgtatcatttggcgaaaactggtgaatgataatgcgtttaatatataaatctaacatagtttttaatagagtgggaaggcatctgtaagagctttaacttctccacgaatgcgttccaaaacttcaggtttatcgtgattttccaaagcttcaaccattaattcagcaattttacggctctcagcttcacccataccacgacttgtgatggctggactaccaacacggatacctgatgtcttgaatggagacaattgctcgtaaggaataccattcttgttcaaagtaatattaacttcttcaagaacgttttgtgcaactttaccattttcaacaactttagtaacatcaaccaagaagaggtgattgttagttccacctgagataacacggaaatctggatgttgattgaaaacgtcagccatggcagttgcgttcttgataacattttccccatattccttaaaggcagggtcaagtgcttctttaagagcaacagccttagcagcaataacgtgttccaatggaccaccttgcaaaccagggaagaccgcagaattcaatttcttagcgatatcttcatcatcagtcaaaatcaaaccaccacgaggaccacgaagtgtcttgtgagttgttgtagtggtcacatgtgcatgaggaactggacttggatgatgaccagaggctacaagaccagcaatgtgagccatatctaccatgaggtaagcacctacagcatcagcaatttcacggaatttagcaaaatcaatgatacgtgagtaagctgaagccccagcaacgatgagttttggttgtacttctttagcttgagccagaatagcatcgtaatcaaggagttcagtttctttatcaacgttgtaagccacaaagttataggtcttaccagagaagctaactggtgcaccatgtgtcaagtgaccacccgctgacaaatccattcccataaccgtatcacctggttgaatcaaagacatgtaaactgctgcattggcttggctacctgagtgaggttgcacattggcaaatttagctccaaaaagttctttggcacgctcaatagcaagagactcgaccacatcaatcacgtctgtaccaccatagtaacgtttacctggatagccttctgcgtacttattagtcaagagtgtcccttgagcagccattacagctttagataccacgttctcagaggcaatcaactcaatattgttttgctgacgttcagcctcagcatcgatggcgttccatagttcagggtcaaatgctttgtaatcttctttatcaaaaatcatagaggtctcctttgaggtctaatggggttcaatcaactcacccacatacagtcggaaattatctcacacttccataggtctctgttagtcatttattctatggtcaactcgggtagagccgccaatagttcttcttttgtaatttttccttgtctgagaatcttagcaggtgagaccgacaaatctaaaattgtcgaatctacacctaacaaggcatcatcatcttgatagccagtcacctgaaaatcaaattggtctcttatttggtcaaaataacgaccactagccttcccagacttattggctgaggggccaatcaagggcccttctgcttgaatcagttctctagtgacaggatgatctggcaaacggaagccaactgtcgccaaacctgaattaatccatctgggtacttggtcattagcctttaaaatgatagtcaaaggtccaggcaaaaaagcatcatacaattgtttcaaatatttgggctgctctttcgagtaggacaggatatcttcataagaagcgacattcaaattcatagctttatctctaggacgatttttcagctcataaacatggttcacagcactctcatccaaagccttagcaaataaaccatagacagtctctgtaggaagaacgactgccccaccgttagccaaagtttcttttaactgtttcttattttccatcatccatcacgaccattctatcttgtccaaactgatccttaaggatacgcacgcgcttatctggaaaatgcagatacaagagttgcttcaaatcctgaccctgcttatagccaatctcaaaatagatttttccttgaggaattaaatgctcagccgctccttcaacaatccgtctataaatagctagcccatcttcatcagcaaacaaggccatattaggctcactcgtcaagacattgacaccaacttcgtccttatcattttcagaaatatagggaggatttgacacgataatatcaaaattaccagaaatatcttcaaaaacatccgattgaacaaagctgatgtctgcctgatttagcttggcattctccttagcaagtactaaggcatcagctgacaagtcactagctgttacttgccaaagggggcgactctttttcagggataccgaaatagcaccactcccagttccaatatcgagaaccttgagctctttgcttgggttttcctctaaaattaagtccaccaattcctcagtttcaggacgcggaattaagacacgttcatcaacctgaaaacgcaagccatgaaagtcttcatagcccaagatatactgagctggtttatgtgcttgcaattgggtgaagatagcagccaaaagtctatcgtcctcttccgaaacttcttgtcgtagattaagaacaaattgagtcaaatcccattgcttcaaatcacgataaacaaaggaaagggcctctggctcttctccaactgcctcaagctgcttctcatagtcagccagaacatccgctagaatcatttgttaagctcttccaatttttgcgtttgatcataaagaaccaaggcatccacaacttcatctagtttcccagccaaaatcgtatctagtttttgaagggtcaaaccaatacggtgatccgttacacggttttgtggaaagttgtaagtacggatacgctctgaacgatctcctgtaccaacagtagacttacgctcagcatcttgttcatcttgagcaatctgtgcaaagtggtccgcaacacgcgcacggataatcttcatggctttatcacggttcttctgttgtgtacgttcttcttgcatctctactttgattccagtaggaatgtgaaccatacgaaccgcagtcgcaactttattgacgttctgaccaccggcaccagaagcgtgatagatatcgacacgaaggtccttaggatcaatttcgtactctacttcttcaacttctggcataaccaaaacagttgctgtagaagtatgaacacgaccttgactttccgtcacaggcacacgttgcacacggtgtgctccagattcatatttgagtttagagtagactgattgtcctgaaaccatggcaaccacttctttgataccaccgacaccattataagaggcttccatgacctcaaagcgccaaccttgtgtctctgcgtatttttggtacatagctaaaaggtcacctgcaaacaaggcagcttcatcaccacctgcggctccacggatttcgaggatgatattcttgtcatcattagggtcttttggcaagagaagaattttcaaacgttcttcatactcttctttagcggctttggattctttgagttcttccttagccatttcttccaaatcagggtcaccgcttgcttccttaatcatctcttcagcatctgagatactttgaatgacttgcttgtactcacggtaagctgtcaccgtttcacgagtatttgcctcttcacgtgacaactccatgaagcgtttagtgtctgaaacgacttcagggtcactaagcaattcacccaattcctcataacggtcttcaaccgcttgtaactgatcataaatattcatttgttatctttactccttatataactaatagtcgtttttaggccttattcaaagggattatattttcttgagggggattaaaccagtgctttcggcaaacggagatataactctcatgtcctccaatttgaacttgtgctccctcataaactggcttaccatcttccatacgaagaaccatggttgcctttctcgagcaataatgacaaatggtcttgatttcatcaatcttatcagacaaaagcaagagatatttagaaccttcaaagagattgttctgaaaatcatttttgagaccaaaagccatcactgggatatctaactcatcaacaattcgtgccaaatcatagacattcgcacgggtcaaaaactgtgcctcatcaactaaaacacagtaaggtcgtggatccatattagcaatgtaaccaaaaatatccgtatcatcaccaataggataggccttccgcttcatgccaatacgactcgagatatagccgaccccatctcgattatccaaacgactggtcaatagtaccactggttttccttgttcttcgtaattataggcaaccttaagaatctcaatggatttcccagaattcatggtgccgtagcgaaaataaagttgtgccaaaccagtctcctctaaaatatgtattgtacttattttatcataattccaagcgtaaaagggagggagactgaacaatttttgaaaaaagttcgcctcactcccttatttttatgataggtttaacttgtgtttcaaacggctcaatcttatcaccctaatatagttttaccagtctaataacttcttatgaataggctttagccaatttttcaaggagttcttctttctcctcatcactagcaaatgaagcttcgattgctgtcttattatgagcatagaagtcttgaactgagctatcaaaatgcttgtgatagagttcgtactctttggtcaggtttgtatcagaaacagtccgattgtccgtattaatggtaatattagcccctgccgctttcatttttagataaggaaaatcatcaactgtaacggctgccttagtctggagattacttgttaaacataactctcctgtgacaccatttttgacaaactcctctaaaagctcaggctcttgagccaagattgttgcatgaccattacgcttaattcccatggcaatcgactcagccaaaaaggctgggcaaccacactcacctgcatggaaagtcatcggacggttgtaactttggacttgttcaatcaaaggtttaatcgctttaggtccataatgatgctcatctccggcaaaatcaaaaccaacaaagtcactatctccaaccttgtttgcttcatcaagaatacgagccgttaattcttgatctgattggcgcatgccacaaactagggccttagctacaataccgaattcttcttgagcttgacgtaagccttgacaaacagcatcaatggtttcagcgacagtcaatcccttatccatcgacaattctggagcaaaacgcacttcaatatagataacattttcaagagcagcctgtttagcaacatcataagccgcaacggtcaaggcttcctttgtttgaagcaaaggacgaatataatcaaaagcctcaagataatctaagagactctcacaggtagcaggtgctgtcacatggtgtttgagctccgcatcgtcctcaggtaactcaatctgtgccaagtcagctaggtggcgaatggtttccaatgatagagaaccatccaaatgacagtgtagttctgttttagccaacttatgaaaatcaatagcagtcattcttttcttcctctctaaacaatatgttttttatcagataaaaattaatttttactatcttatcactcttatagaaaaagtcaaggtatcgcgcctaataggacgtagtagattcttgaaatgccattagcattttgttaggatgtaactatcaagaatacaaggagaaactttatgtctgactatattttaccagaagtttgggaaaacccaacctctatgggaggtgcctggggtggcctcaatcaacctacagctggtgcacgttttgaacaaactctacctaaaggtgaccaacctttccaactctatactcttccgacaccaaatggtatcaaggcaactatcatgctggaagaattgaaagaacttggtgtgactcaagcgggttatgacgcttatcgtattaagattggtgatggtgaccaattcggctcagactttgtttcaatcaatccaaactcaaagattccagccatgatggattactctgaagaccaaccagttcgtgtcttcgaatcagctaacatcctcctttacttggctgaaaaattcggcaaactcattccaactgatcacgcaaaacatacagaagttctcaactggctcttttggcaaacaggtgctgctccttttctaggtggtggttttgggcacttcttccactatgcacctgaaaaaatcgaatatgccatcaaccgttttgccatggaagccaaacgccaacttgacttgcttgataaagaattagcaaccaagccttatattgctggtgatgagtatactatcgctgatatcgctatctggtcttggtatggccgtcttgctcaagataagatttgggataaggctggtattttccttgatgttaaagaatacaagcatcttcaagcttggactgaaaaaattgccaaccgtccagcggttaaacgtggacttgaagtcgactataaagagatctaatttttataacggtttgcctaggccaaccgtttttctattgtttcatgatataatagaagcaaaatgacaaggagacattcatgactgtatttcaagctattttagaaaaaatcaaagcctacgacactattattattcaccgccaccaaagacctgaccctgatgccattggtagtcaggtaggactgaaggaaattttaaaaacaaactttccagataaaaaggttcttgcgacaggtgtcaatgaacctaccttatcttggattgctgaaatggacgaagtagctgatcaggattatgaaggagctcttgttatcgttaccgatactgccaatactcctcgtattgatgatgaccgatatagtaagggcgactttcttatcaaaattgaccaccatcctaacgatgatgcttacggagaccttcttttaattgatactactgcttcaagtgccagcgaaattgtgacagactgggccctcactgtcggtttagccctttcagatgcggctgcacgtgttctctataatggaatagttggcgatacgggacgcttcctcttcccatcgacaacttcaaaaacactacacattgcagcaaaactacgtgaacacgacttcgatttttctgctatggcacgtcgtatggacagttttcccttcaaaatcgctaaattgcaaggctatgttttcgataatctcgatgtcgatgaaaatggggcagctcgagtcgtcctaacacgaaaagtacttgatgactttaatatcactgatgctgagagttctgctattgttggaactcctggccgtattgatagcgttgaatcatgggctattttcgtagagcaacctgagggccattaccgtgtacgtcttcgtagtaaaagcattgtcatcaatgaaattgccaaacgccatgacggtggaggccacccacttgctagtggtgccaattcctacagtttagaggaaaacgaacaaatctatcaagaaattaaggatactgttgcccatgcaactcactaatcgtcgtgtacgtcttatgggaactgttattgatgtttccatctatcataatcaaccagaacccgtactagaccaggttgaggcattgcttcatctttataataagcgattctctgctaatgacgtcagttccgaacttatgcagattaataaggctgccggtataaaccctgtaaaggttcacccagaactgtttgaactgatttctcttggaaaatggcatagttgccaagttggaagccaccttaatattgccattggccctctcattcagacttggcgcattggcttttctgatgccaagctcccccttcctgaagaaatcgctccactcctagatattattaatcccaatgctattgttctatccgaggaaaatcaaagtgtctttctccaagaaaaaggtatgaaaattgaccttggtgctctggcaaaaggttatattgcagatcgtatagcagattatcttaaagctgaaaatgtaactagtgctctgattaatctgggtggcaatgtcctcacatttggaccagcattacacaatcctgaccataaatggcgaatcggtattcaaaatcctaaggagacgaggaacaccaacctcatggtgcttgctatcagagaccaatctgtagttacttcaggaatatatgaacgcacttttgagatagatggcaaaacctatcatcatatttttgatagtcaaactggctacccagtctctagtgacctagctagcctcaccattatttcatctctctcagtggatggcgaaatttggacgacccgtttatttggggcaagtctcgaacgcattttccaggaagttagttcacaacctaatcttgaagcaatcatcgttgataaagataatcactgcttccagacagctggcatatacaagatccgactttcctaaaaaatagtaaaaaagacttgtcaagaagttaaggttttgataaactagaatagttaaaaaaaaaactatggtgcggaaagtaccatggcagaaaggaaatattttaacatgaaaaaagatatccatccagattaccgtccagtagtattcatggacacaactactggttaccaattccttagcggttcaactaaacactcaaacgaaacagttgaattcgaaggtgaaacttacccacttatccgtgtagaaatctcatcagattctcacccattctacactggccgtcaaaaattcacacaagcagacggacgcgtggatcgtttcaacaaaaaatacggtctcaaataagcaacttcttgttgttaagccattccgattggaatggcttttttctgtgctctcggctataatcactccttcatatttagaattttagaataaaaaaacagcttcccaaaagaaactgtttactcctcttatcctgctttaccaatagccaaagcccagataaagaaaatagcaaatccaaacaagaaaatcaaacctgcaatggcaagtcctttcaaccaagttggaaaatctttcttagccttagtgacaagcacatagttcaaaagcgcaaagaatggtgttgtaaggaaagaaccaatcatggcgaaacgaagcattattgctacttgaccttgaaagaagaaaataatgataagaccaagaatagctgtcaaggtcatccaaactttcaaaggtgtcgcactggactctttcttgttaaacaaaagtcgtagagatatctcatttacacgtgaataaccatcaataactgtgatgacagtaccgaagatacacaagaaagcgatgaaggtaatcaaataacgtgaccaatcaccaagtactgatgcgtacataccaacaaactgagcaatgtacttagctgaagcagcctcaacaggtttaccagttggatactgaataagagcaccaagagctacaaagaatactgccaagatagccgttccaatatagccaacattaaagtcaaagagtgcatcatcagtgttaaaatcaaccgatttctttttctcggcagaccaaagtgagttgatagctgaaatttcgattggagctggcatccaaccaagaagcgatacgataaatggaagagccgctagttgccatggacttttctctacgaaatccacgctatactctgggtgtttgatagcagcaataataaccgctcctacggttgcaatggtcaaggcagacataatccatttggccataccgtcaagaagtttgtatccaccgaagagtaacataccccagataattgcaaccaaaataattgaccaggtggtaatactcaaaccaagcataggaaaggcactggcaatgatggctgaacatagaatggaaactcccgctgtattaaccaaggctgaaaagacattcaagatgaagaatacccagagaaaaattttccccttttcagcatatccttcaaccaaagtttttcctgtatctgctgtgtattccgcaccaaaacggaaaaatggatatttaaagaggttagctagaataaccaaacctaacaaggcccatccataagaaccacccgcttgagttgatgaaacgatgtgggaacccacctacagcagcagatgccattaggatacctggtcccattgcttttattttactacgccaggtagactgactagttgcatttgtttgtgacataaagtaatctcctaaaacaaattttcagaataatctgaattgatggttactattttacacaattgtgcagaaaatttcaatggtgtttcaaatattttctgaaaaatcaaaaaagccatccaaacggatagctctttcactatttagaaagtccagtaaagaaatctacgatagcttgccagatttgcgcaaaaatatttttgctgttctcaagtgttttgttagcatcaaagtttaagttgatgccagaaaaagtattacccgctttcgaaacgatagaatctttaagtgaactcaaacttgacttgaagctagcgctatcaatgattgatgacttagataaatttaaagcaaagttcaccaaaagattgatttgtgtatcagaaagattcaagttgtagttattgatggtttgctgaacaatcgttttagcctggtcttcagtcaacttgtcgcctttatctgcaactgcagatttgatatcagtcatggctacattaagcttatccgcatcatagtcactcttacctgaattttcctcattgatttgagaaagggttttaagctcctcttgagcaagctctttgctttcatctgagactttagctccattctgctctagtgaataataaataccagccaaggcactttccccagtaactggaataggtgctgctactgtaatcttagcatgttcgataccaagtgtcgttgcagcattacgatacatatccgatgtaactttcgtgatattttgtggcgttacaatatcaacagtcaaggtttctttagcacctagctttgcgattttaaccgaagaatataactgtaaactagaatcgtctgcaacattcatgatttttgcatatgctgatgtcgttagcgtcttaacattggtatctttattgctatcataacccaacaaattcaaggtctggttgcgttgatcttctgacaaagaataccccatgacatagtcaggttgaacataagattcatcaataaccttttgaacgtctgacgatgtggctgcctgagcagctgaagcaaaggtagtcactgaagctaacagagcagcaccagtaataaaaagttttttcaatttcatgtgtttttcctttcgaaaatagattagtatccataatctcctaaaggacgactgacaaaagggccagacgtgtattcattataccatgacttaaaaaaatggggtcaaaaaaaactactcgtgcaattccaaggggaacccgtctggatcagcaaagaaagtcatcttttccccagtaaaactgtccttgcgaatcggttggcatgaaatacctttttgttccaaagcctcgacaacctcttcaatattggcaactttaaaagctaaatgacgtagtccacacgcctcaggataagacagacgttttggtagctccaaatagtctaaatcactagtcctatttccaaagatttctagttctatatcactacaacgtaaatctaatttataatcatgacgttccggacgatgattttcacgtataatttcaaaacctaatttattaacataaaaaccagactcagtctggctttcatatcatttggcttttaggtaacttctcttagattttatgagtgttatttagaatagagaataggagtgtatctatctaaattttatcgtagattttttatagttgatatccttatccaatagtttcaataaaggagttacatattcaggattttgaaacttaggaccaaaaatgacctcctcaatttgaattggattttcccgttctatataaagtttacctactccagaggttttgtcaattttgatttccttattacttgggtctagattagcatagtgtaagatacgaagttcgttttcatatttgtaatcgacagatttaaataagtaacgaatttcttcgatacattcagcaatagcatcttgatagttccccttcgtaacttttgaaccactacctagtttttcctttaaacttttcaacatttttgctaaattttctatttcggccttatcaaatagttcggtttgttcaagttctatatcttcacctatatttttaacataggcaattcggtagagataatcacgatttccttttggtacattctcttttttttcagatttcgaccttttttcttcacctttaatagctacagttgatttaatattatttaattcatttggtgagccttttaaatcatacgatagagtagattctaacttactcattgtctctactaaggggatggcctctttacgccaagaaacatcattgaaggaagtaaatctagaaaaatcatcttcacgaagtaccaaacaaacgcctttggcatcatcaccatattgggaccacatggccaaatcatccgttttgtttgtaaaactcattaaaaaccaagagcttggttccaagatgtctcgcctatctaagcccaatatctgttctatgacgattccttcttcaggatcattcatataattagcattatataagcgagtttttccagatactgaaaaatccttcttatcattcccctcttgatttaacataatttggagagtgcttcccttggtgtaatggccgaatttaagcacctgatttttattttcgtcttttaggccaagttgatacttgattttttgaacaagttgataaatagatagcaagttctttagttcactcgagtcttctttataacgctctgtccatgtttgtaaaatagcatatttggtattatttaaaagaccttctcttaggataaagttgaatagcatgtactcctcgctgtcacaaacattctcattactaaaaaatagatcatcaaacttttgtatcataaattttgaaaattctttatagcgttttttaattgtttttgtggtttgccgacgttcacttgactctgtttggtgttcaaataagcttgctaagaccatgctatatataaaagcaatttcttcagattcttggaattgttgttgcacgacttgtaatttttctgcagtagtttccaattctttcaattcagtctgcttggttgataaattgaacagaatcatagcatactgcaaagctatatcaggcgaatcctggaattttttctgcaatttctctaattttttagcagtagcctctatttccttcagcacagtctgctctgctgataaattaaccaaaatcatggcatacagcaaagttatatcaggcgatttctggaatttttgctgcaatttctctaatttttcagcagtagcttcgatttccttcagctcagtctgattgattgataaattgaacaaaaagctggccaatgcttctgctatatcaggcgattcaggaaatttttgctgcaatttctctaatttttcagcagtagcttcgatttccttcagcttagtctgattgattgataaattgaacaaaaacctggccaatgcttctgctatatcaggcgattcagggagtttttgctgtaaattctctaatttttcagcagtagtcactagttccttcagcttagtctgcttggttgataaattaaccaaaatcatggcatacggcaaagctatatcaggcgattcagggaatttttgctgtaaattctctaatttttcagcagtagcttcgatttccttcagctcagtctgcttgattgataaattgaacaaaaacctggccaatgcttctgctatatcaggcgattcagggagtttttgctgtaaattctctaatttttcagcagtagcttcgatttccttcagctcagtctgcttgattgataaattgaacaaaaaactggccaatacttctgctatatcaggcgattcagggagtttttgctgtaaattctctaatttttcagcagtagtcactagttccttcagcttagtctgcttggttgataaattaaccaaaatcatggcatacagcaaagctatatcaggcgattcagggaatttttgctgcaatgtctctaatttttcagcagtagcttcgatttccttcagctcagtctgcttgattgataaattgaccaaaatcctggccaatgcttctgctatatcatgcgaatcctggaatttttgctgtaaattctctaatttttcagcagtagtcactagatccttcagcttagtctgcttggttgataaattaaccaaaatccaagcatactgcaaagctatatcaggcgatttctggaatttttgctgcaatgtctctaatttttcagcagtagcttcgatttccttcagctcagtctgcttggttgataaattgactaaagccttagcataacgtaaagcaatgtcttcagaatgattgaagcgatcaacaatttctttgacagaattagcagtgttccaactctcctcaacattttcttgttttgctgacaaattgactaaaatcctagcatatcgtaacgctatctcttcagattctggaaattgctcataaattattttggctttttctgctagagtttcacggctagccttatctgtcgcgttggctgataagtttaggagcttatttaactctgctaaactttgatccaaattgtatttctgttcatccatactatgccctcactttgaaatagtaattattgctagttaaaactaatctgccttttcgtttcataattagtttctacatattttatcatatcaaaaaccacattcttcttctagaatatgctagtatatgtatgatgctttttaaacataaactcatacaaaaaactcatagcgtttcattggtataaactgtaagtaaccacacaaacagaacccgaggaaaaaccatgagctactcccatcttaccataaccgaccgaataaaggtagaaacctacttagaattaggtttgaaaccttgctaaattgcaaataaacttggcgtccataagtctactatttcaagagagttaagacgatgccaaaatggttattccgcagccttagcacaggaacagtacgaccacagggctaagcaaaaaggtcggaagcctcgtttgacaccaaagttgaaaaaggaaattgaggacggtttaaaatcctcctggtcgcctgaacagatttgtggccgctatcagcttgaacaaaagccaatggtagcttttaaaactatctataactggctctatgctggtttgattgatctggatttaagcgtccttcgtcgtaaaggaaaaactcgacaacccaaagaaacacgtggaacatttaggattggtacgtcgattgccaaacatcctaaagaggtcagtaatcgtaagacctttggtcactgagagctcgatactgtggtgtcttccagaggcaaaagcaagggctatttagcgacctttctagagagaaaaacgctcttttacttagctttcaagataccagacagaacagccaaaaccatgttttcagctatcgaacaactttgtaagctatttccaaaagaggctcttaaaaccttcacttcagacaggggaaaagagtttgcctgctatcctctggtagagaatttaggaatttcattttttctttgcggacgcctattcatcttggcagagaggaagcaatgaaaacgcaaatggcttactaagagaatatttcccaaagaaaacagatttagtcgctatctctgatgaggctttgaacaaggctttatatgatatcaatcaccgaccatgaaaatgtttagcttacagaactgctagtgaagctctagaggatgagttcgagtaaatgttgcacttattcttacaatttatcatataaaaatctcgagagcactcataatcagaaactatgatggcaacatggtgtaccgtaattaaaaacattttttcctccatagaaaaaggccttacggccttttcttaactttgaaattgattgtatgatttgttgaaggcttcaataatatctgaacttgccttatcaaagtctacttgagttttcaaaactcctttgacaattgtacgctgagttgcttcagcatctgtacaagttaccaaagtcacttcagacttaccaggagtgtcatcaaccactgctacttcagttggttggacaattttcacctcactgataacataggtgtagatcttatttttatccgtaaggtaaatcttcataccttctttagccctatctaatggagagaagagcatatcagaagccccagcaataccgaaaatatggtgactagccaaagagtagttattttctccacccatgacttgattttccttcatagttccagcaccgtaagtcaactctgtatttccaagacctttgaaaatagggagattgataccgacctcaggaatggcaataccaccaatgactggaagatcttgggcatccatctgggcttgcaagaccgactctgtactaatagatttaaccgtatcaaagtcaaaactcgcctcagcttccttgtttttgtctatggtctttttagaaacattacttacttgatatttgttagtattccaagcgattacagtgtttcgaattgatttattgaaaattaaagctaaaccaacaactaagagaacaacaatcaaactccaacgaagaacctcaagccacttacgacgctttttaggcgtcttatttttgttacctttgctcattagttgtcaccactttcttggtcttcaataacttgatcaacttcttcaggttcaaccaaagcgaaagtgacaatacgagcagtagcatctaaacgcatgaccttaaccccttgagttgcgcgaccagtttgagagatgttagcaactgcggtacggataataacacccgtatcagttatgaccataatatcctcatcaccagaaactgttacaatacctgctaggttaccatttttatcagtgatattagctgtcttaatacctttaccaccacgacccttagttgggtattcagtagctgaggtacgctttccgtaacctttttcggtgataatcaagacttcttggtcttcagtaatagctgctgcaccaacgacttggtcaccatcacgaagggttacccctttaacaccagcagccatacgactcatactgcgaatagtatcctctttgaaacgcacactataaccaaatttagtaccaatgacaatttcttcattaccagtagtcaagaagacattgattagctcgtcaccttctttaagcttcaaggcaatcaacccattttgacgaatgttcttaaattccgcttcttttgtacgtttaactagaccttggcgagttacaaaaacaaggtgattattttcagaagcttcatcactcttggcattaatgactgtttgaatggtctcaccttcgtccaacttcaagagattgacaataggtaagcctttggctgtgcgaccgtattctgggatttcataccccttaagacggtatacacgacccttattagtcatgaagtaaaggtgatcatgagtgcttgttgagacaatatcacgaacaaagtcatcatcgttaacaccagtcccttggacaccgcgaccaccacgtttttgtgaacggaactcgtcttgggctaaacgtttaatataccctttatttgagagagtgataacaacatcttcttcctcgatgaggtcctcatcttcaagagaaataacttctccgaccataagctctgtacgacgagcatctgcgaatttacgcttgctttcgtccaattcttccttgatgatagcaatgacacgttctggttttgccaaaatatcagctaaatcagcaatcaaggcaaggagatcattgtactcattttgaatcttatcacgttccaaacctgtcaaacgacgcaaacgcatatcaagaatggcttgactttgacgttctgtgagttcaaagcgagccatcaactcagcttgagcctcagcatcagtttgactgttacggataatcgtaatcacttcatccaaatgatcaagagcaatcagcaacccttctaaaatgtgggcacgtgcttcagccttgtctttatcaaactgtgtacgacgaaccacaacttcttgttggtgagcaatataatcagccaagatttgacgcaaagaaagaattttaggaacacccttttcaatggccaacatgttgaagctaaagttagtctgaagttgcgttaatttgaacaaattgttcaagataacattggcagaagcgtcacgacgcacttcgatgacaaagcgtaccccttcacgagaagactcgtcacggactgctgtaatcccctcaatacgtttttcctgtgctaaacgaacgatatgttcatggaccttggtcttattgaccatgtaaggaaactcagtgacaacaatacgctcacgacctgatttagttgtttcaatttcggtacgtgaacgaaggacaatagaacccttaccagtctcataagcacggtgaataccagatttccccatgaccaagcctccagttggaaagtcaggtccaggaagaacttccatcagttcacgtgttgtaacttcaggattatccatcatcaatttgacagcatcaatcgtttcagccaaattgtgtggtggaatgttagtcgccataccaacagcaatccctgtcgcaccattgacaagaaggtttggaatacgtgacggaagaacgattggctcacgttctgatccatcatagttatcttgaaaatctacggtattcttgttaagatcacggagcatttccaaggcgattttagacatacgcgcctcagtataacgctgagcggcagccccatctccgtccatagaaccaaagttcccgtgaccatcaaccaacatgtaacggtagctccaccattgtgccatacgaaccatggcttcatagatagatgagtccccatgtgggtgatatttacccatgacatccccggtaatacgggcagattttttatgtggcttatcaggtgtcaccccaagctcattcattccataaagaatacgacgttgtacaggctttaaaccgtcacgaacatctggaagagcacgagacacgataacactcatggcataatcgataaagctcgtcttcatctcagacgtcaaattaacgtcaattaaattattatcttgcactctaaaaatgcctcttttctttcattcaaatcattccaaactctaataaaagagtatagaaaatttctataatattataccataaaacgctttaattttcagttgtgtaaacgctttcatctattatttccttattatttcgtgacatccatcacttaaagtggtagaataagcagtgtacggggtaacccaattaaaaaataaggagatgtttagacccatgactgcaactaaacaacacaaaaaagtcatcctcgttggtgacggtgccgtaggttcatcttacgctttcgcacttgtaaaccaaggtatcgctcaagaacttggtatcatcgaaattccacaattgttcgaaaaagctgttggtgatgcgcttgacctaagccacgcgcttgctttcacttcacctaagaaaatctacgcagctaaatacgaagactgtgcggatgctgaccttgtagttatcactgctggtgctccacaaaaaccaggtgaaactcgtcttgatcttgttggtaaaaaccttgctatcaacaaatctatcgttactcaagttgttgaatcaggcttcaaaggaatcttccttgtagcagctaacccagttgacgtattgacttactcaacatggaaattctcaggattccctaaagaacgcgttatcggttcaggtacttcacttgactcagctcgtttccgtcaagcacttgctgaaaaacttgacgttgatgctcgttcagttcacgcctacatcatgggtgaacacggtgactcagaatttgccgtttggtcacacgctaacatcgccggtgtaaaccttgaagaattccttaaagacactcaaaacgttcaagaatctgaattagttgaattgttcgaaggtgttcgtgatgccgcttacacaatcatcaacaaaaaaggtgctacttactatggtatcgccgttgcccttgctcgtatcactaaagctattcttgacgatgaaaatgcagtacttccattgtctgtattccaagaaggtcaatatggtgtaagcaacgtctttatcggtcaacctgctatcgtaggtgcacacggtatcgtacgtccagttaacatcccattgaacgatgctgaacaacaaaaaatgaaagcttctgctgacgaattgcaagctatcattgatgaagcatggaaaaaccctgatttccaagaagcttcaaaaaactaatctaacattagttaaataaaagtctccagtaggaggcttttttcgtattaaaaaaagaaaaaacagctaattcgactgaattagctgtttaaaattatttagctgagatagctgctttagcaatatagctaagcggttggttaaagtgtggcaagaagaacaaatcaagcaattgaagacggtcaatagttacaccttcttggatagccaatgagaacatatggattcccatagagatgtccatgcgtgataccatttgagcaccaagaactttgcgtgtatctttgtcatagacaatcttgattgtaacgtcttcattttcatcttccatgaaggcagctttttgaagatctgttgattctactactgctggattgaagccaaagcgttttgctttttcttctgtcaaaccagtagataccatgttcaaaccatagattgagataccatttgatccttgaacaccgtttgattcaacatcgccaccaccggcattatgaccaccgacaatacctgaacgaacagcgtttgaagccaaggcaatgtagttcacatcttcaagagcattgtcataaacggtagcacagtcaccaactgcataaacgtctttgattgatgtttcttgtttcttattaacaaggtaagcgccattacggaatgtgtccaatttaccagcaccaagagctgtgttaggacggaaacctactgcaaggacaaccatgtcgacatcgtaagcatttttatcagtgacgatacgttcaactttagtatctccttcaactgccttaacagtttcaccaaatgccaatttaataccgtggctttccatatttttagccataagttcagtcaaatcatggtcataataaccagccaaacatgtatcaacaacgtcgataaggataacttcttttccatgacgttggaaagcttcagccaattcaacaccaatgtaaccagcacctacaaccgctacacgtttgatatcttgagatttgtcgttcaacttatcaataacttcttgagcgttttggaaaagtttaacaaattgaaggttttcaagtgttgcttcgaaagtacggctaccttctttgatttcagcaccttcgattggaggcaagattggttgtgagccagtagccaaaatcaatttatcatatgattcaacatgctctttaccatcgacaagagctgtgacagttttagcatcaaagtcaattgactcaactggtgagttcatgtaaactttagcacctttgctttcaagaccttcttttgttgcatagaagagtccgtctgaaccagaaatctgattaccgatccaaagagccataccacaacccaagaatgaaatgttagagttttggtcgaaaacaactacttcattttggtctccgtaattatcgagaatagtattaatactaaaagtaccagcgtggttagcaccaacaactacgatttttgacataagtttatccaactttcttttgataatagtttactattttattctaccataatcggaaaacggttacaccttttatgctcagactttgttactttttgaacaaattaagtttctatgctcaaaacccaagtagatcatgtcaaaataggtagaaaaacactttatgatgacggttacctttcttaacaccatcactgtcttaccaaatcctagaaagttactttgctttaaaatataaaaaaagagtgagtaactttctctttagagaatgtcaacactcttttatctctatactaactcattaaaatcccaaacgtctgtccaaccttcataaaattctggttcgtgacataccataaggatactgcccttgaaggcctgaagggcacgcttcaattcatccttggcgtcaacatccaagtggttggtaggttcatccagaacaagaacattattttcacgattcataaggagacagaagcgaactttagcctgttctccacctgaaagcacttgaatttggctttcaatatgcttagaggttaatccgcatttggctagagccgcacggacctcagcttgatttaaggctgggaaggcatcccaaaccgcttcaagaggcgtctgacgtgacccttctgcttcttgctcgaagtaacctaggtcaataaagtcacctgtttcaacttctccttctagtggttgaataataccaagcaggctcttaagcaaagtagtcttaccgataccattggcacccacgatagctactttttgattacgttcgaaggttagattcaaaggagccttggtcaaagggcggtcgtaaccaataacgaggtctttggtttggaaaataaaacgtccaggtgtacggctttccttgaaatggaattcaggttttggcttctcagcctgcaattcaataatttccatcttatccaatttcttctgacgagacatggccatatttcgcgtagcaacacgcgccttgttacggttaacaaaatcctgaaggtctgcaatttctttctgctgacgttcataggcagcttccaattgtgcctttttcatagcatagacagattggaaattatcataatcacctgcatagcgaaccaagtcttgattttcaacatgatagacaatgttaatcacatcgtttaggaacggaatatcatgcgaaataagaacaaaggcattttcatactcctgaaggtaacgtttaagccaggcaatgtgttctgcatccaaatagttggttggctcgtcgagaagcaagatatctggtttttcaagtagcaacttggccaagagaatcttggtacgttgaccacctgaaaggtctgttacatctgtgtccataccaaaatccatgacaccaagagcacgagcaacctcatcaatcttagcatctagtgtatagaaatcacgcgtttccaagcgatcctgaagctcacccacttcttccatcagagcatcaacatcagctccttcgtcagccatagacatgtaaatctcgttgatacgttcttcagtcttaaagagttcatcaaaagccgtacgaaggacatcacgaacagtcattcctttttcaagaacagcatgttgatccaaataacccgctgtaacgtacttagaccactctaccttaccttcatctggctgcaattttccagtaacgatagacatgaaggttgactttccttcaccgttagcaccgacaagaccgatatgctcacctttgagcaaacggaatgagacattttcaaaaatagcacggtcaccaaatccgtgactaagatttttgacttctaaaatagacatagcatatctggactgaaccttccttcagccctttcctttcttgacattaactttactattttaccattttttaatgaaaatttggacctccgcttctggaaaattaaaaagaaaaagcaggactaacctgctaaatctttagtttctctgtaaaatacgtttgaagacaggatataggagagggaccgcaatgatcgtcactactgatgttccaaaggtcccaccaattttagtaagtgccaataccatagctgcattgagtggtaaagccgcaacaacactattaataatcgtatacttaacaaaattcaaaataattttggttactgccgctatgactccaatgattatgatgttagccattttgtcatttgattttagaagcttttcaaaaacaagatagagaacataacaaacaatcaaagattctaaaatagtaatccagacctcagcagcatagccattgaaaatatcaaatagccctaaccctactgttgcgactagcgcaccttttctggcaccgaaaatcaaaacagcaatcacaactagggcatttcccagatggacaaattgaggtccaaaaggaatacgaataaactgtacactcacaataattaaagctgcgtacaaactcaattcaactaattcacgtgttttatcacttttcatttttctcctccaatagggcattaaaaccactgaataaataaccgatatggggctcatagcaaagaccgtactttaaagaacgaccatcggacagtgttgacgaaagaaccctatccatgacatccaaggctaaatcacaaacctttagtatatcaagattataaaagtaacctgctgataagactgccgttagtaaatcgccgcttccataaaaatgatagcgataacgtttttgcatgcgataaatcgttcgattagtctctttatcaaaataagccaacccaattttatctgtctcaaatgagatacctgttaaaataacttttcgaggtccaagcttggtcaattctctcagaagcttttcaatagtggcctcatcataggaacctgcttcaagataggtagtatccgtcaacaaagcagcttctgtcagattgggaatgatgacatctgcctgttgacagaaatccttcatggcttctacatagtttctatcaaaaccttgatagagacgaccattgtcacccataatagggtcaacaaatagagctatctgtttatcacgagccaattgacctacacgttttagtgcttcttctgacttaaaataaccactcacaaggccatctactataaaatccaagtgctcccactgcttacaaaatccctttagatcatccgtaagatcccgtacatagatattttcaaactcccctgtatgcgaagataaaagaacggttggtaggggaaggacttcagtttgacaggctgacataataggaagactactagtcaaagcaaccttacctagaccaaccaggtcattggcaacaattactttggtcatctattttccttcccaggtctttttaaactgtttaacaaaacctgtgtggaaataaatgtagtaggccactcctaaaccaagaatagcagctacaatgtcaaaaggaatcttcataatagcataggcaggcgtaccatagataaaggctcttcctaagccatatccgactaagtcaataatagccccaatcaagagacctaaagctgccctagacttgctcaattttcctaagcgtcctccaacaatgagtgcaatagcgagaacttgaaggctgtgtgttactagagttacccacataggaagagggtaaaaaagaaaatctccaataaaggaacctactccggcaataataactgcttctgtaggtgggaaaattaaaccaactaggaaaataataatcccgttaaaatagaaatgacctcctggcacaggaatggataagagactcgagctcaaaataatgacaagtgccatgaaaaatgcagaaatggttaaacgttttgctgacatacctaaaactccttagtcaataaatatagtataagtttatgaaaattctgacgattagacaagatagtattttcaatactgtctgggtacagatttcagacaataaaaaacaccacacattcatgtggtgataagacttattgagcttttttatcaaagtatttgacaggtgccttttcaagattttgtagtgaaagcttggcagtcgcatttgcctcagtaccgtaatcagagaaatcaatgcttagatcatgatcaaaatcagcaacggcatagtcaacaacgatttctttaacttccttaggagcaatcttggtcttatttgcaatcttatctcggtcatcatctttagaaaagaccaatgtagcaaccttcaattcttccttctcttgtttcacatcaaggaccaccttcatcaaaagagtgtaggcattcatggtctctttacttgagttgctaagtttatagtgaacacgaacagctttttgaccttctggtgattcgattttagttgcagaaagaacttgtacactagcatcttgtcctgtaaatagcattttgtttttatcgtaggtccaagtaggctctttctctggtgtgcaagctgacaaaccgataatggtaaagcatgcaagagccagaagtcctaagattttcttaaaagtcattcttacaatctccttaaacttgtttgggatggaaatttagtatttcctaataacctttttattatgtcaaaatctaataatcttgtcaaatgtctccagacatcttgctctcagaggacaagtagggtacaataaggaaaaatctgtaaggggtcagttatgagtatttatcaagatattgtcgagaccatcatcaaagatatccaaaatgggaatttgaaaaaagggagtaagctcccctctattcgtcaactaagccagacttatgcctgtagtaaggacacagcccaaagagcactcttggaactaaagtatcaaaactatatttacgccgtacccaaaagtggctattacgtcctcgaaggtcgcaatgaagtcgataataaggttcttcttaaccttaacgactacaatcaattggcctacgaggattttaagctgtgtttagatgaaagtttggcgggtcatcaagactatctcttcaactattatcatgaacaagccggactcaaagatttgcttgaagccttaaagagtcgattaatagctgacgatatttatgtcaattcggatcagattgtcataacctcaggaagccaacaggccctctacatcctttcacagatggattttggtaatggtggctacaaaattctcttagaacaacctacctatcatcgcatgaaccagctcgtcaaccgtcaaaatctagcttacgaaacgattaaccgtggttttgatggtttagattttgaccgcttggaagagtactttaaatctggacagattaagttcttctataccatcagtcgttactccaatcctcttggattaagctattctgccagtgaaaaagaaaagctggcccaacttgccaatcagtataatgtttatatcgttgaggatgactatatgggagactttagcgatagtaaaaatctcccgattcactactatgacacccaaaatcagaccatctacatcaaatccttttccatggctctttttccaggtttacgtctaggtagccttgtcttacctcctaatcttaagcctacctttttgagccacaagggacttattgactatgataccaatctcatcatgcaaaaagcactttccgtttatctcgaaaatggcatgttccaaaaaaacattaaaaaacttggtgacctcttccaacaaaacatgagtaaaagtcaagccatcattgagaaatctaaggttatcataccttatcagatttcccctagacatgtgacctggcaacttcctaaagagttttcacttgaaaaattcaaagcccacaaacagattcgttttttagaatcctcctttattagaccaacttctgaaacttatctgcagataggtcatggacaggaactggaatcctttataaaacttttaaaaaagacaaagtgacaattagacacaaaaaaagccatcgcttgatggcttttcttatttagtctgctcaaagcgtaggtgtacaatgaccttgtcaccataaccgttccgctccaaatctcgttgcaaacggtatgaaatataatgctcggcaatattgataaagcctgcttccatgagacgattttcaaccaatgactgaatcatgttaatagttggacgttctacctgagcatcttgaagatcaagcactacttttttcgtcacttgagcaaggttttggcgccaagtatcatcaagaacatacacagtctgtgctgcttttaagatggcttggtaaattttatcaggatcaaattcagcaacttgaccattacgtttaataatttgcatggctaccctcttttcatggctttttcttttattatgcagagaatttacatatttgtcaagtgcaaatccctgaaagagctatccagactgcttattcccagaatttagaaatgtaaactggtttgccatgtttatcaaaggaaagggttgctgtgtaggactctgacttatgatggcgcatataattagcgattctcttgtcaccgtttatcaggtgaatgtcataagtctgcccatcagagcttacaaagtgagcattaatcctagcactactcgtttttgtcccaacatgactaatatctatttgttcaacttgaccatcaatggttttagctatagggcctctatagtctttgtaaatagtgacggttgccaaaacatcatcaactaaaacataggtcattccgaaaacgaacaaataaactattggaatgacaatgaaagataatttagttttgcggaacgtttctttatgccaagcccaaatatcctgaggtgacatggttaaaaattttttaaaatattgatgaacgagtaacctgtagactaataatacaaatattacttgccccaagggataagcaaaactgggtaaaccatcaatcagtacattgaccttatcagattcaaaagtatagtgtccccatacaccgtcaaagaactctaaaaacaaattaactcctttttgtaatatagtctaatcacctaaaaatccatcttctcagatggattttttaactattaacgtacttctgcttcgactttctcagtaagggctttggtgattttttccatgtatttagcaacttcttcgtctgtgaggttgtcatttggattttggaaggtaaggctataagccattgatttcattccagcaccaagtttttcacctgcgtaaacatcgaagagtttaacggcaaccaagcgtttcactcctgcagagtagatagcatcaagaacttcttgatgagtgatttctgccttgagaagaagggcgatatcacgtgatactgcagggaattttgtgatttcaacaaatggttgagccggttgcaaggctgcttctacagcactaaggttaatttcagccacataagtttctggaataccgtagtttttagcagtttgtgggtgaacttgaccaaggaatccaatcgtttgaccatcaaggacaatagcagctgtacgacctgggtgcatgcttgctaggtcttttgtcggtacatagtcaactgaaacctcaagtttatcaaagagagcttcaacgatacctttagcatagaagaaatcaactggtgttgctttagtttggaaatctttttcagctacaagaccagaaatagcgaaggcaaaggtattgatttcatttggcaattcctcttttggattgccattttgttcaaagaccttaccgatttcgtaaatagcaacgttactattcttacggttaacattgtaagcaacagtatcaagcataccagagaccatgttctgacggagggctgaacggtcaacagtcattggccacatcaactcagtcaagttagtaggtgtcacagcaaattcaacagctttttcaggtgtagtcaaagcatatgagatgatttccgtcaatccagcaccttcagcaatggtacgaaccttacgacgaagcgcttgtgtttcagtcaactcaccagctgttcctgctgcctctggaagtgtcgtaggcaatttttcatagccgtagatacgtgcaatttcttcaaccaagtctgcttggatactgatatcccaacgacgacgtggtacagatacagtgaatttatcagcatcaccagtcaatccaaaaccaagtttctcaaacacatcttcaatatccgcaaaagtcaattctgtaccaaggcgaacatttacgtagtcaaggcttgtagaaacttggactggctctgtatcaacagatcccgcttgaacacggcctgcaagaaccgttccatttgccaattcttgcaacatagctgcagcaaaatcaagggcttcaaggacagtatcattattgatacctttttcaaaacgtgatgatgattctgaacgaaggttgagacggctacttgtcttacgaactgattttccatcaaaaacagcagcttcgagaacgacatttttagaattgttgtcaatttcagttgaagcgccacccataacacctgcgagggcaactggtttgtcagcaactgtaataacaatatcttcagcagtcaattcacgttcttcaccatcgagagtgactaatttttcaccatcacgggcatcacgggcaacgatacgtgaatcttcaaatttatccaaatcgaaggcatgcattggttgtccaaagtaaagaagaacatagtttgtcacgtcaaccacgttgttgattggacggataccagcattcataagaaggttttgcaaccattgtggacttggttgaacagtaacattctcaaccacacgactagcataagtagccactttatcactttcgatagctactgaaatcttatcagaagctggtttgctgtcttcagtaaccgttttttctgggaagtgaacagattttccatagattgcagcgacttcatgggccacaccacgcatagaaagagcatcagcacggttaggtgtgattgacaattcgatgatttcatcatcaaggtcaagatatgggaaaatactatctccaggtacagcatcttcaggcaaaatttggataccatccgcaaattccttaggaataatgctatctggaagtccaagctctgccaaagaacagatcatcccgagagattccatgccgcgaatcttaccttttttgattttgtaattgtctgcaatacgggcaccaggaatggcaacaattaccttgatgccagcagtgacatttggagcaccacaaacaatttgacgtggaccttcagcatctcctgtatctacttgacacaagtgcaagtgtgtttcaggcacatcttcacatgacaagacatgaccaacaaccaattttgacaagccttcggcaggtgtctcaacaccttccacttcaatacctgtcgtcgacattttttcagcgagttcagcagtggtaacatccacatcaaccaactcttttaaccatttataactaactagcataattatgatattaagaccgtgtccttgcaaagcaaggaccaaagtgacaagattttaggaagtcgcctgaaatcctgatttcagtagcgacttatctaaatctcgaactttgaggtcgtattcaaatcctttctgtaaaattatcagttcaactgataaatgagagaagagttcaaacctctacttaagcgggttcaaatcctttctgtaatttaggaatatgtatatctgatataagaggaagacgaactaacacgtttaatcgccttttaaactcctctctatcaacttaataataggtttatagttttaatttaagcaaccagtcgcggtcaactttaccatcaccaactggaaaatcgtgttctgcgaatttttcgaagccatatttatcgtaaaatatctgtgctttgaaattcctttcccaaacacccaaccaggcccaatcacaacctagatcacgagcttcttgtaaggcaaactcaaagagttgcttacccaagcccatgccttggaaggcctgactgatataaatacgttgaatttgaaaggcattatccaagtgctgctctgtttgagcagaacctacattagtctttagaaaacctgccttttcaccatcaacgagaatgaaaaagtaacgcgattcttcatgagtgatttcatctaagagaacttcctcagaaagtgcggtatcaaagtaaccttgcaactggtcttcggtattatcatgagcaaaagtctctctaaaggtatcttcggagataacttttaattctgctacttcttccggaagaaccttacgaataacgactgacatgacaacctcctaaaccttatttaaactgttctgagaaacgaacatccccttggtagaaaccacgaatgtcgttgataccataacgaagcatggcaatacgttcttgaccaagaccaaaggcgaaacctgaatattcttcagaatcgacaccagacatctcaagcacttgtgggtgaaccataccagcacccaggatctcaatccaacctgtcttcttacatacgttacatcctttaccaccacacttgaagcatgacacgtcaacctcaactgaaggctcagtgaatgggaagtaagatggacgcaaacggatttgacgttctgcaccaaacattttttggataatcatttcaagcgttcccttaagatcacccattgagatgtttttaccaacgaccaaaccttcgatttggtggaactggtgactgtgagtcgcatcatctgtatcacgacggaaaacacgtcctggtgagatcatcttaagtggacctttagaaaaatcgtgtttatcaagtgtacgagcttggacaggacttgtgtgagtacgaagcaaaatttcttcagtaatgtagaaggtatcttgcatatcacgcgctgggtggtccttaggcaagttcatacgttcaaagttatagtagtcagtctcaacttcaaaaccatcaacgatttggaagcccatccctaagaaaatgtcttcgatttcttcagctgtttggctaagaatatgacggtttccaagtttgacttggcgtccaggaagggttacgtcaagactttcagagtcaagttgtgcttgaattttagcggcttcaacaattttagcggcttcgtcaaaagcttcagtcaaaacgtcacgaacttcgttgaccattttaccaactttagggcgtttttcattaggaaggtctttaagccccttcaaaagatccgtcaaagagccttttttacccaaaactgcaacacgcaattcttgtaattctttagagtgttcactacgcatttcagccaatttagcctgcgttgatgttttcaactcttgcaattgtgtttgtaaatccatgagattcctttctgatgtaacaatttcgaatcgcaaacaaaaaaccacatgccaaaactccaacccggagcgttgacacgcggtaccatccgttttttatctggttacccagaccttgattcgtcagtcgttttcatgagtgaattcgccgaacttcccttgaggaggcttccagtccatgacctccaatccctgtcaatttccataaggttactagtctctacgacttctattcaattactatcaattttaccaaaaaaacaaaaagctttcaagagctgacaaagaatcctttagttaatgccaaaatggaaaatatgtctaagataattgacacacctatacaaatttgctacaattatgtcagataaagttgacataattaataaattgcgacttacagcaacacattagcttgtctttcaaaaggaggcccattatgaatcatgtcagggaatttagaaagaatatggggttttcacaattagaacttgcaaagtctattggcgtttcccgacagaccattaacatgatcgaaaataacaagtataacccaacactggagctctgtctaaatctagctaaagcactagacacagatcttaacagtctcttttgggatggaaattgcgaatagagatataagatagaaaaaggtaaatcatgattaaagaaactttcactgacaaactcattaaacgtttttacggtattactggacctttagatgaacaaaagcgccaacaggttgatcgaatgggtaacatggctttcgttgttctcttctttaccttactttgtggtaattgtattgcctttcttataggctttaagtatcccgaacttgtagctcgtatttatcctatcctcctcttgattatcattctgttagttagcagcatccttacttataagttaaagataagtgctgttaatgcttttgacgaggaagaactgactgagaaagagaaaaaacaacttaagcacgtggggcttaagtcaggtttatgctttgggactagcatgttcttaggcatgcccctagttcacttcttagttgacaataaagactatttgacagaattattctcaatccataatatgctatcaggcatttttgaagctatcctttttggggctatcatgcagggcttggtcaatgctggtatcaaacaagccaaatctcaagctgagaaaggtgaccaataaactaaaaagacaaagaaaaatccaggtttcccagcctggatttttcgctcgaaagaagacttcttagacttgtatacgcgaagcctaaatgtgtccagaaaatcgtatcttaacacatacactataactaacttcaaaaaacaccatatccccatatgacatttccttaaatattgtaacatgtcagtgggaaatgacaagtcgccctctctctcataaaccctaaaatcctaatcatagcccttgttatgctattttacgcaatcgattgcgtaaatttgaaagcgcaaacttaattattttctgaaagtccttgcaaattttttgagactatgaaaaaagatagtgataaagctatcaactatctttcatgaaaatataatctatttttagtctaaatcaaggtctttcagtttgaccgaaacgattttcgagacacctgattcctgcatagttaccccataaatagagtctgctgccgacatcgttcccttacggtgagtaaccactataaactgactagacttgtcaaaacgattaaggtagtcaccgaagcgtttaacattggcttcatccaaagccgcttctacttcgtctaggataacaaatggaatggtcttaacacgaatgatggcaaagagaagggccaaagctgacaaggctttctcgccacctgacataaggttaagcgattgaattttcttacctggtggctgcacagaaatttctaccccagcctctaggagattgtctgaggtcaaaatcaggtctgctgaacctccaccaaacatctgggtaaaggtctgtttaaagctttctcggatagcctcaaaggttgctttaaagcgtgatttcacttcatcatccatgtcatttatggtattcagaaggaggctcttagcttcgagcaaatcatccttttgtccgttcaagaaatcaagacgttgcttaacctcttcaaactgggcaatagcatctacattgaccggacccaaagctttaatcgaacgctcaagaccttgcaaattctggcgagtttgttcgacattgtcaagagggctggcctgacctttagcgacttcaagtgtcatctggtaatcttcagctaactgagtcgcaaacttacgaagtgattgactaatctgactttcacgttcttccaagcgagtctgctgacgaatcaagtcctcgttacgattacctgctttagccaaacgttcctccaagtcttccaactgaccttcgtaatcttgcacctgaatcttggcacggacaagagcttgttccaaatcgtccttacgttggacagcttctttatgctgtgcttgcaaatgcggaaggcggtcagtttggtcatcattgacctgattattaaggagcgctttaagactatccgattccttcattaactcagacaagtcggcttgaagacgattactttctgtcttagcaaaacgcaattctgcttgcaaatcacgttccttcaactgaagtttagattgcttgtctaagagaacctgtttttgttggccaagtgcgtctttgtcttccttaatagcctcaatacggtcgttaatagcctcacgcttagatgcaatttgtgctaactctgctttaagttgttcagccttatcttgaagatttgcaccatcagttccctgagaatcctgtttgaaactatccactagggtttgatttttctccacctctgacaaggcttgttgatgttccaagcctagtttttgctcctgaagacgagcattttcaccatctaccttaaggtcttctaactctttctgtagagccttacgtttgattttgagggcttcaactttgtcttcactatcacttaattgagccttgatctggttaatttcagcagtcaatgcatccagttcaggcttgataaagagattattgttttgtttgttggtaccaccagcgaaggcaccaccgggacggatctcagacccgtcaagagtaaccatacgtacctggaaacgaacagctcgagctgctttattagcattgtcaatggtatcaaagattgccgttacccctagaaggttttggaaaatattagataaacggtcctcataggtaaccaaatcggaagccatcccaataaaacctggtgcattggcaagactttgagaaaattgtccatttagttgacgtggtttaatagtggtcaacggcaagaatgtcgcacgaccctgacgattacgtttcaagtagtcaatcgaacgcttagcagccgcttcgtcctcaacaataatattttgtccactagcacccatagcaatttcaagagctgtctgataacgtgtatcaaaggtcaagtgttcactaactgcaccaataattccttgaatggattgggcattttgaaggacagccttaacccctgcatagaaattagaatgatttttttgaatagattcaagactttgacgacgggcatctttactcttaaggtgatccatgaggtcaaacatctgcttttgagcctcttgatagtccttatcaagagcctgataagcctgggccttttctttgtagctagctaaaagattttgaagacttgcttgggccgcttgataagctttttgggtttcgctagccacttcctgagcggaaagtaagtctgcctgagcttgtttatattcttcagcttgtgcctcaagcgcttgtgtctgactgtccatgtcgtgagtgacctgagtcaaactgttggaaaccttggcttcctcctgcatcagaccaacatagtcttcacgtaaacgttcaataagcgtatctggatcatcagaaaattgctccagttctttttgaatagcaatcagctcctgggcaaggctatccaactcagcattcaattcgacttggcgatgattaaccttatcgagtgctgcctgagcttcttctttcaaatgctctaactcactgagacgagcttccgtttcttcttttttctctgaacgctgctgactctccatggtataaagatcaatttgacgctcaaagtcactaataagacgtgtgacatccaccaaggtttgttggtcagaagaaatttgttctgaaatttgatggcgtttttgtttgagttcctggttctcagtctctaaacgatgacgttcctcataatagctggttaatttttccttgacctctgacaaatcctcttgggtctggctcaagtcagacttaccaatttcaatatcgtggaccaaaagattaagctgagtctgtctacgttcctcatctaattccaagtaacgtttagcagtcgctgcttgcttttcaagcggtttaacctgaccgtccagctcgtagatgatatcttccaaacgatcaaggttatcttgggtttgattaagcttactttccgtttctttcttacgtgtcttatatttgagaacccctgctgcttcttcgaaaatagcgcgacgttcttcaggtttggcattaaaaatagcctcaacacgaccttgggaaataatggaaaaagaatcacgccctaaacctgtatccatgaaaaggtcatgaatatcacgcagacgaaccttacgaccatcaatcaagtaatcattgtcaccgtttcgataaatgtgacgctccacacgaatggtttcaccagcacccgcgataaagccatcactattatcaagagtaactgccacttccgcatagttgagagccttacgaacctctgttcctgcaaaaataacgtcaggcatcttgcctccacgcaaactcttggcagatgattcacccaatgcccagcgtagactctctgtaatatttgattttcccgatccatttggacctacaacggctgttactcccttgtcaaagacgacttgcgtcttgtccgcaaaggatttaaagccctgcatttcaattgatttcaaatacatgcttaatttcctagttgttcaagggcagccttagccgctgcctgttcagctaatttcttagattttccaagacctgtgctgagctccttaccatcaacagctacctgcatagtaaattctttggcatgagctggtccagactcgtcgataacggtataagtaatatcaaccgtaccattgacctgaagacgctcttgcaaggctgtcttatagtctgttacacggtcaaagtttcccttttcaacctgaggaatcatgacctgattcaagaatttctcaactgcaggcaaaccttgatccaaataaagagcaccgaggaaggcctcccagaggtcaccaaggatagtggcacgttcacgtccaccagatttttcttcccctttaccaagacggatatactgctcgaaaccgcaagcctttgtaaaacctgccaaactctcttcacgaacgatagtactacgcatcttagacatttctccctctggcttgttagggtagcgtttgtaaagataaacagaaatgactaattgcagagccgcgtctcctaaaaattccaaacgttcattatgtgaaatgtttaggaggcggtgctcattggcatatgaggtatgggtaaatgctgtttctaagaggtctttttggctaaaaacaataccaaaatcctgctcaagtttttgttcaagttgattcataaaacttcctttctttttaagcacactaactctaattatatcaaaaaaagcaaattttcatgatagaaaactgcttttagagcctatatccgctgatttttgtgagatttaacctattcgactaaaaaaagctgagcaagctgctcaacttcattttcttaataatctggacgaacaacacctgtaactgtctcacgtgttgcttcgacatcttcttcaaggacaaccttgatgatacgtttggcttcttctgaagtacatgcaaccaatggcaaacgaagtggtccaacttcgaaaccaagatggttaagaacagccttgacaggtgcagggcttggtactgagaagagagcgttaactttaggaatgaatttacgttggatagctgctgctgtcttgaggtcactattttcaatagcttcaagcatggcatgcatctcatcaccgtttgtatgagaggctactgagatgacaccgttagctccaagattcatagcgtggaaggcatccccatcttcaccagtgtagaccaagaaatcttcaggtttatgttcaataaggtaggccatattagcaaggctagtacattctttaacaccaatgatatttggatgttccgccaaacgaagcatggtatcaggagccatttcaacaaccacacgtccagggatgttgtagatgataattggcaaatcagaagcatccgcaatggctttgaagtgttggtacataccttcttgtgatggcttgttgtagtaaggtacgatagcaagaccagctgcgaaaccaccaaatttggcaacttccttagcaaactcgatagagtcgcgtgtatcgttggtaccgacacctgcaatcaatggcacacgtccattaacaattttctgaacagctgcaaagagttccaactcctcatcgtgagtaagcgttggactttcagccgttgttcccgccaaaagaagagcttctgtatggtgagccaagagatgctcaatcaattctggaagggcatcataattgattgatccatcttcgtggaaaggtgtaataagggctgtgatcagtttgacatctcttaattgatcaattgacataatattctccttcaaccgttttctaatcctttccattttaccataattttgaccagacagacagataagttgacaattttctgaaaacatgaggactgactgtttcaattgatggccaataaacaaaaaacagagagaagtctctctgctttataggattcagcatgattttagtattcaagtacaacactaaatccttactgatttctgtttcgctccctatttcaattcaaatttcaattctgaagttgagcgaaccaaaccacgttcgtgaagtgtttctgcgatttggactgagttccaagcggcacctttaaggaggttatctgaaacaacccacatgtggatacctttttcagcatccaagtctttacggatacgtccgacgaatgtatcacgtgaacctacagcattaacggcttgtgggtagacttggttagcaacgtcgtcttcaaggactgcacctgggaattctgcaatagcagctttcacttcgtcaattggtgccacttcttttgtttcaatgtagactgactctgagtgagctgacaagactggaatacgcacacatgttgctgatacagcaatgctatcgtcttccatgattttcttagtttcgtttgtcatcttcatttcttcgtaagtgtagtcattttcagtgaagacgtcgatttgagccaaggcgttaaaggcgattggatagtgtttcttatcaccaccacatggcaagatttcagctttgacatcacgtgggttaacgccatcattcaaaacttctttcaactcacgttgtgtttcaaggattgctcccataccagcacctgatacggcttggtaagttgacacgatgatacggtccaggccccatttttgacgaactggctcaagggcaaccatcatttgaatagttgaacagttagggcaagcaataataccgttgtgagcatcaagcgcatgtgcattgacctcaggtacaaccaatggtacatctgggttttgacggaagtatgatgtattatcaacgactactgcaccagctttaacggcgtatggtgcatatttagcagaggtagatccaccagctgagaaaagtgcaatatctacaccttcaaatgcgtcttcagtcgtttcttcgatggtcacgtcttggcctttaaattgcaagactttgcctgcagaacgagcagacgcaaggtagcgaatgttatcgattggaagtgttgattcttccaacattttaatcatttgagcaccgacggcacctgtagcaccgacaacagcaactgtgtatcccatagtaaaacctctttcggaattttctatcaatttagtttagtgaatctattatactacgtttaagcccagttgaaaagggttaaaaggccaagaataaagaaaagcccctaccaaatggtaagggataggaggcatctttcgatgagagtagcaggttcacacaactactcaaggtccgctcctgcgttacaatctaatgtagacctcctcagcgcaaaaggctccaaagagccaatcgactcatcgcatgtttctattctagcatattgaacgacagagtcaagctcttgatttctataaatacttacttgcctcacgaatgctaagagatgccatttgactagcatgttgatcaataaaagcccgaacccaatcaggatttacctttgagtaattgcgcaaactccaaccgatagccttattaatgaaaaactctgtctgcccaaagttgttacagataacctctgctaggagagcagtatctgtcaaatctttacgcataagctggtggtcaatggcaatacgtctcaaccaaaaatcctcatcaagactccattggcgcatgatattcttggtttctggatagtgaaaagtaacctctccgatgataaggtccaattgatctatactgtcccaccatgatttggtttgagccaattcctttagctttggaaaatcttcaggtctaagctccttcttctttttatccagataatccatagcaatatattgaaactcacggtaaggttgctgccaacactcttccacaaaagtccaatcaattggattttttatgaaaggcttaaaaaactctctttcaatctttttgagaattggtttttgaacgccaagaaagctgaatttatttttcatataagcttccattgctgggactttcgttgaatcagcttggtcttctaacaatttcaaaagaatgtttgtatccatatgatttcttcttttttacatcaaaggtccaatcaaagaaaagagatagccacatagacgatgagccataggcattttcaacaaactttccagagtgacttcctctgagagagcctgggttttctcaaaatcttgttcaatcttaatcacttccagatttttgtagagataaaccccgtcttcaaaattttgatagagacttcgatagtctgtgttaatggtacctaccacagcttgttggccatcagaaacataaacttttgcatggacaaaacctggagtatagcggaaaatacggacgccagcctccaagagcactttaaaataggtcgtcgcaatatcaaaggcatactgtttatctggaatccctggcataatgatccgaacatcaacacctcgtctggccgcaaaggtcatggctctgaccaattcatcatccaaaatcagataaggcgtcatgatatagacataattagttgatgtattcagaagatgtaaataaacattttcggcaaccttgtggtaggtcagcggtgaattgccataagggagtacaaagcccgaactcttcctttgttgaggtttttcttgtagatagtgctccatatccgttttatcttctattccagtcactgtccacatggtcaaaaagagagctttcagtgtttgaactgctggaccatctaagcgaagggccgtatccttccaatggccaaagcgttctcgtttattaacatactcgtcagcgatattaacgccaccagtataagcaacttgaccatcaatcactgttatttttcggtggtctcgatagttgtaataggtcgataaaactggcttaattggcgagaaggtctgagctttaataccaaccttgtgtaacctctcgatataatcgtaggataaggtggtcatctcattcatcccatcaaacataacacgaacgtccagtcctgccttagccttctcctccaagatggctaatatctctccccacatgatgccttcatcaatgatgaaatactccataaagatataacgctctgcctttttcagatcctccaacaaggccggaagcatatcatctccaagttggaaataagtcactttagtatctctataaattggaaaatgagcaggactatgctccagaaaataagccagtctttgcagttgcctatcgctatgaggcagatagtcctcaacctctggctcggtagccaaatagtcggaagtttgctgagtagcttccacaagacgctttttcaaacgtctgacaccaaaatcagctagcgaaaaatagagcaaggcggtcccaaaaatgggaaagagggcaatgatgatcaaccaagaaagtttggaacgggagtccatggaacgattgagcaaatataaaaaggtaaaaacactcaataagtgttcccataagataatggatgggaaatgctcttgtaggctaatatatgaaaagacaagaaaggccaattctagtaagaaaaacaggaaaataggtaccttacgattaagtagaattttagcccatttagacggcttctgaggcaatagccgggcacttatttcttgggacatataggctcctttagtacaaagaaattagctcacagttcagagctttttctacgatttttcaattattagtatcattctggcgtgggcaaatgacacaatcaatttgtcgactttgactagacatttctagcctcctaccgtattttcctgacaggaccatctaaggtcttttgcatccagacaatatcatgccattgctcaaacttgtagcccacttttggaaaatgagcaacttggacataaccacgtttttcatgcatagcaatgctagcctcgttcggaacagcaatacaggctaagaatcgcaaaaagccccgttgttcaagttcctcttcaagagcatcatagagctgacttcccagacctcgaccacggacatcttcatgcaaatagatggacaattcagttgtccaattataagctgtccgggcatagtaggttgaagcataggcatatccgagaacttgtccatcctcttcagcgaccagataagggtaagtttcaagggttttattgatacgattctcaaattcttgaacactgggaacttcatattcaaaggtaatggccgtcttctcaacatagggtgcatagatgacctgaatagcttgtgcatcagccaagttggctggacgaatggttaacatcattttctccttcgacttcattatctttattttatactataaaaaaagagggctcaaccctcttcttacaaaaattgacattacatcaatggcgccactagtttggtcaataagcctaaggccttttgatggaatggaagtttttcaacgtcagtcgtgctgactcggtgacactggtcttttgtcgcttggaaatcttcctcaatagcaagaaccgaagaagtcctatagagataggtcgcacactcaaaatgatgatatagacttcggtaatctaaattaatcgttcctacaacagcccgactattatcacttacaaagatcttggcatgaataaatccaggtgtgtactcatagattttaacgccagaggctagcagtgttgggtagtaggtcttagctaggtagtaagctgattttttatcaggaataccaggcatgatgatactaacgtctaccccacgctcagccgcaaacttgagagcatggagtagttcaccatccaaaataagataaggtgtcatgatatgaacaaaatcacgcgcatggttaaggatgtcaatatagacattctcaccaactttatccttgtccaatggaatatccccataaggaacaacaaagccaggggtatcaaacgccttatgttcaaccatatacggcgtaacatctaaagtttcgttagaataggtccacatctgaagaaagagaactaaaaaagtatcaaccgctgggccctccagcatcaaggcagtatctttccaatgaccgaaacgctcaatcttgttgatatactcgtcagctaaattaaccccgcctgtgaaagcaaccttaccatcaatcagcaagattttcctatggtcacggtaattgtaataggttgacaggaaaggggttaccgatgcaaaaactcgagattgaatgccaattttttccaatcgtttcttatagtcaaaactcaaagttgaaaattcattcataccgtcatacaggactcgaacttccaccccttcttgaaccttttgtttcaagattgctaggatttcaccccacatttcaccttcaccaatgatgaaatattccaagaaaatgtacttctctgctttaaggagctgtttcttcatttcctcaaacttggcttcaccacttgggaaataggtcgtcttcgtgtcacgataaactggaaaggaaccgttcacattttcaagatattggaccaagttatagttgctggtgtgacgctgtttaagctcttcgagggcctgattatcttgtttcagaataccagaactgcggtcaatattgctctgaatagcacgcttcatccctgtgtaacctatatcaagtttcgtataagccaagagcaaggttccgataatagggaaaggcaagactatcaggagccatgtatttacagccgtcgactccatatcactttgaaagagataaataatggccagaatacgaaggactacttctgtaacttgcaggtgtatcctatattgatgcaaccagaggtaagacatggccacaacaacaagctgcagtaagatgattaagaagataatcgtaacacgactaaagattccacgaagaaagccacgacgactcttatcataaagacgttcaattttagcttcgtttttgatagcatgactcctttccctttttaattaatcttattataaccaaatttgtaaaattaagcaagacagaaaaagccatctatgttaggctcagataaacaccacatttatctgaaaagaactaacatataggacgaaatggattaccgaaacaaatggattttacgaatgtttctcaaaattatgaggctgggacaaaagtcctagcctctcaatttgtctttggattgtcgagaaagacgcagtggttgagtgggctctactacactgatttcatcagcttttacagccctactcaactgtgcggaggtgggacgacgaaatcgaattctaacgaattaccgatttctgtcccactctcaagaaatagaattcctaggaaatcattgaattatcaatcaccctaccaagtttttctgagttacttgaaaagtctaacttaatttgacaatttaggttcttaaacgtctctagttaatcaactaaaaattataactagctgggtgttatctaatctcccctcatttttaagtttttatcatttttgatataatggtagagaatgaaaggagactttatgtcaactaaaaatttaacgccggtcttaaaaacctcttttgtgctactggctatcctcgtccttcttggtattgttatgcctgacggctaccaagtttggtcagaacaactaagggaagttatttcagataaacttggctggttttacttattactggtcacgtcaatcgttctactttgtggctttttcctggttagtcccgttgggcaaatcaaactgggggaacccaattcggtgcctgaacactctactatctcttggattgccatgatattttctgctggaatgggaatcggccttgtcttctacggtgccgcagagcccttatcccattatgccatttcaacggtacgagctaccccagggtcgcaggaagccttagccgatgctttccgttacactttctttcactggggcatccatgcctgggcaatatatgctttaatcgccctggccctcgcctactttggtttccgaaaaaaagagaaatatcttttatcggttaccttaaagcccttgtttggtaaaaaaacaaacggtatccttggtaagatcgtagatacgattacagtggtcgctactgttatcggggtggcaaccactcttggttttggggcagcccaaatcaatgggggactcaactacctctttggtattccaaacaatgcccttgtgcaagttattatcatcattatcacaaccatcctctttaccatttcagccctttctggtcttggaaaaggggtaaaaatcttatcaaacaccaatcttattttagcgattggactactcgccatcaccataatcatcggtcccacagtccagatttttaataccttgaccgatagtatcggactgtatatttccaatttcttccgtatgagtttcagtgctggttcctttggtcaatacaatcgtgactggatcaatacttggacgattttctattgggcttggtggatttcttggtcaccattcgtgggagtttttattgccagaatttctaaaggacgtagtatcagacaatttctatccatcgtcttattagcaccgactgtattaagctttttatggttttctacctttggaacactttcaacgcatgttcaatcacttggaaatgtagatttaacacagtttccaagtgagcagaccttgtttgcaaccttcagtcaactgccatttggttttattgcctccgttgttgccatcatcttgatcattaccttctttatcacgtcagcagactctgcgacctatgtgctagctatgctctctgatgatgggaatctcaaaccaaagaataaccttaaaatcttctggggcgtactccttgcgactattgccatcgtcttacttctttcagggggcttagtagccttgcaaaatacgctgattatcgtagcctttccattttcactcatcatggtactgatcatggtttccctagtcattgaattgctacacgaaaaagacaagatgggactgtcaatcacaccgacacgataccctaaaaaagatcaacccttcaaatcttatgaagaataaataacccaatttgtaaaacgaagctagacagaaaaagccatctatgttaggctcagataaacaccacatttgtctgaaaggaactaagataaatgacctatactcatcttaccacaaacgagcttgtaacgatagaggcttactatcaagaaaacataataaaaatcataaccacccgtctaacgggtggtttgatcaagggctataagcccataataccagccagcgcctaaagacgctggctttcactttgttcaagccttattgcttttgactcgtcacaagcctctcaaagaggcattcgcattacttaccattatccctgaagggattttcatattcttttacgcttaatttgtccaaagcgatatcatgcttctcttgttcctgaatatatttcttaattgtggcttcattaagtcctaccgtacttacataataaccttctgcccaaaaatgtctgttaccaaatttatattttaaattggcgtgtttatcaaacatcatcaatgcacttttaccttttaaatatcccataaaactagctacactcattcgtggtggaatacttactagcatatgaacatgatctggcattaagtggccttctattatttcaacgcctttatattggcatagtctatgaaaaatctctcccagactactcctatattgattatagattatttttcgtctatacttaggtgtaaatacaatgtggtacttacacatccattttgtatgtgataaactgtgagctttttgcaccatagtcttaactcctttcgttttacaattggcttgaacacctatattgtaactcgtttggagtttttttgttatgacggtataaccttcgatgcgcacccgcatagcgggtggtttatttgtttcgcaccttgggagcgaaacggacttaaagtcacataaaattaatataaaaagtgtctaaaatacatatttagacactttttgtatgctataattttcattaacactataacaaaggagaaccaaatgaaacgtttaaatactctatttcatattataaaagttacaggttttactcaatttttgataagttttgtaagttttatttttatttcaggaggaatacttttattagttgaacctcaaataagtaattactgggatggactatggtatgcttttgtcacatcaacaacagtaggttacggagatatactagctactactctaatcggacgtattactagcgtctttttaactgtatatggacttattttttttggatgcttatcagccgtaattgtcaattactacagcaaattaaatacatctaataataaaactgactaacatatttcttagtaactgtaaaaaataattctttctctgccaattccaaacggctacaatttcctgacctcgcgatacttcttgactatcctctccagtctgaacaagattaccatcttcgacatcatctaagtctaattctttcttgatagtcttgaagagttttccaaatccaatctgtcgtttccgataaagtccctcaaacaaatcacccgttatccgttccttcgtctcttcaggcaagacaatcacttgtttgtcattctctttctcgacatcaaatggattttactaatatttctcaaaattatgaggctgggacaaaagtcctagcctctttattgtttttggattgtcgagcaagacgcagtggttgagtgggctctactacgctgatttcatcagcttttactgccctactcaactgtgcggaggtgggacgacgaaatcgaattctaacgaattaccgatttctgtcccactctcaagaaatagaattcctaggaaatcattgaattatcaatcaccctaccaagtttttctgagttacttgaaaagtctaacttaattgttatcatttaatttatctaacagagcctctgctactttttctggaatgccaagtgcttggatgtcctcaacagtagctttttggatagctgtcatagacttgaagtgtttgagaagtttttgtttgcgcttaggtccaaggccctccacgccatcaagtttggagctgaaactatttttactacgaacttgacggtggaaggtgatagcaaaacggtgaacttcatcttggatacggtgaagaaggaaaaattcctcggattgccgtggcaaatcaatgacctgcaaggggtccccaaagagcaattcgttggtttggtgcttgtcatttttctgaagccccgcaactgggatagaaagattcaattcattgcgtaggacatccttggccacattgacctgtccttgaccaccatccatgataataagatctggtggtgttagcccatcgcgtttgacacgactataacgtcgacgaatgacctcacgcatgctggcataatcgtcaggcccttcaaccgtcttaatcttgtatttgcggtactcttttttattgggttttccattctcaaagacgaccatggcggatacagggctcgttcccatgatgttagagttatcgaaggactcgatgcgaaccggtgtcggaattcccatgagtttgcctagattttcaatggctccttgggtcttggctatatctttttcaagaagatcaaatttttgagtcagactgacacgggcatttttcgtcgccagattaaccaactgcttcttctcgccacgttgaggtttaaagaccttgacctcatctccaactagagcttcgacagactcttgatcaatgtctcctggaatgaaaatctccttaggcttgagatgacgactatccagataaaactgacccatataggttagaaaatcttcctcagcatcattataataagggaacatattgacatcacgctgaatgagttttccttggcgaacaaagaaaacctgaacacacatccaacccttgtccacgtagtaaccgaagatatcacggtcctgcatgtcctgacggataaccctttgcttggtcctcagcgtcgatactgcctcaatcaaatcacgatactccgcagcacgctcaaactccatctggtcagacatatccttcatcttggccttaagctgattaacgattttatcatcatgaccgtttaggaaattcttgacatcctcaaccaaaccttgccaatagtcctcagtggtgtgacagatggtatgggcattacattggccaatatggtaatagaaacagaccttgttggcgggatttttacatttcttaaaggggaaaatacggtccaacagtttcttgatttcattggccgcaccagagtctgggtaaggaccaaaatagagaccgccatccttcttaacctggcgggtaatcaagagccttggatagagctccttagtaatcttgataaatggataagacttgtcatccttgaggcggatgttgaatttgggcatattctcttggataagattaatctccaaaagcagggcctcaatattggactcggttacgataaattcaaaatctgcaatctcagataccaaaagctctgtcttggtatcatgacttccacgaaaatagctacgcacacgattttttagatttttagccttaccgacatagataatattgccgaatttgtccttgtggagatagcacccaggattgtttgggagcaattccaacttatgtttaatcagatcattcatgctttcattgtagcaaaaaaagagctgaaaagctcttagtagtcataggtaaatacaatttgaaaagtggtctatttgctcaaaattgtcaaaatttcttggtagtttttgacttgataagttggaacagctggagtctcattaaccaaaccatttggattaaaccaaatgctgtcaattcctgcattattaccaccttgaatatcagcagttagactatcaccaatcatgagggccgaatcggaatgaaagtcatttacctgatccgaaattttttcaaaaaagtcagtagacggtttgtgggcacccacttcatctgaaatgaaaatatcgtcgaagaatggcaagatgcttgaggcttgcagacgaccacgttggatgtagctaacaccattagttgctgcatatatcatgtgacctcggtctttaacattcgataagaaagcatgggcctgaggcaactcctgcccctgttggctcaagaaatgctggtaacggccagctaagtgactgccatcaacctcctgtccaaaatgctcaaaaagacgagaaaagcgcgtgcgaagcaattccggcttagtgattaaaccatgattgagatcttcccacatggaacgattcatggggatatagtgatccttgtaaactttaagatctcgtgaagccaccccagcctcttcaagaaggtaggtcaaagccaaatcttcagcacggtcaaaatctaggagggtgtggtcaaggtcgaaaagcaaatgcgtgtaggtcatggtatatcctttctaactggaaatctttaggctctattttaccacaatccagctacatataaagaaacaaacacaaaaaggcgacccgcaggccgcccactcagatttatgaaaaataagtattgcttacttaataggctgctattatatccattgaaccttaaagaaagcttaaagtagattatttttttactatttctatagatttttacttaaatacctaatcgctctaattcgtggtatactgaaaatacaagattaatcaaacgaggcgtgttatgaaaaatttaaaatttcaatccgtttttgacatcatcggacctgtcatggtcgggccttcctctagccatactgcaggagctgttcgtattggcaagattgtttctgccatctttggtgagacaccgactgaggtagaatttcaactctttaattcctttgccaaaacctatcgaggtcacgggactgatgtagctctagtagctggtattttaggtatggaaaccgacgaccctgacattccacgcgctctggatatcgcatacgaaaaaggcattaaggtctactggaaaatcaacaaggatagtaatgcgccgcatcccaatacgactcgtattaccttaaaaaatgataaaaaaaccatttctgccacaggtgtttctatcggtggaggaaatatccaagtaactgaactcaatggttttgcggtcaatctcaagatgaatacaccgactcttatcattgtccaccaagacgttccaggaatgattgcccttgtcacagatattttgtcgcgttatggcatcaatatcgctcaaatgactgttactcgggaaaatgccggtgaaaaggccattatgattatcgaaattgactcgcaccagtgtgatgaggccgtcactgaaatcgctagaattcctcatctacataatgtcaactttttcagctaagagggggattgcatgttttacactattgaagaattagttcaacaagctgaccgagattaccaaggtaatatcgccgagctcatgattgctacagagacagaactaactggacgggaacgtcctgaaatcctagctctaatgactcgaaatcttgaagtgatgaaggagtctgttcaggctggtttgtcccctgagaaatcaccaactggcttaaccgggggagacgctgccaaactggatgcctatatcaaaaatggaaagaccttggctgattctgctgttttgggtgctgctagaaatgccatggccgtcaatgaatctaacgccaagatgggattggtttgtgccacacctactgctggatctgctggctgtctgcctgctgttcttacaactgctatcgaaaaactgggcttaaccgaatcacaacaattggactttctcttcactgcgggtgcatttggcttagtcatcgcaaataatgcctcgatttctggtgccgagggtggctgccaagccgaagtcggttccgcctctgctatggctgctgccgctattacaatagctgctggtggaacacctttccaagccagccaggccatctgctttgtgcttaagaatatgttgggactcatttgcgaccctgtagccggattggttgaggtcccatgtgtcaaacgtaatgctatgggagcaagttttgccctagtagctgctgacatggccttggcaggcatcacatcagccattccagtcgaccaggtcgttgatgctatgtatcaggttggttcagccatgccaactgccttccgtgaaactgctgaaggtggcttagcagcaactccgaaaggaaaggcacttgcaaaagaaatttttgggtaatttttagtaaaaaacaaaaaacttagaagctttcatacttctaagttttttcttcttacatagccttttcaacgtttttattttagctgaatagccattttgtcaaaaagtgccatgtttctttggcaatatttgcaaggaaggttgagagactaaatgcgttgaattttttgaggaggttctcaactagtggagtgacagtcttaggtgtttccactggagtgttactttcttcttgcttactagtattatcctgagatgaatctggcactgtgtttgtactgtcgtgaccattaatttgcccagttggttcaggctctggagcaacctcaggctgatgctcaggttcaactggtttattttccggatttgggtctggactaggttctggctgaggatcaggtttgattggttcgtcagtagtgtcactgcttgtgtttgtcattttttcagttacgaagaagtttttgaattctactgctccatcccaaagaccgacacctacatgggcttgattgaagtaattatccacagcatcaaattgatgatggagcacttccttgccatcgacatagactgtcatggtgtccttgcctttcacaaccttgacatggtggtattgaccgtcattgatagccttatccaagtgagcttcagcgatggtttcaccaccaaaacggaagagacgaacagtgtcgttatcagcaaattggacagaataggcacgacctggttcttcacgttccgcagctacaaagaggttgaccaaaccatgttggtatttgacatcgatatcatagtcaaattgcttgaagccattactttcataagccatgaagaagtcattggcactgacattgctatcgtaaagggtatcgtcatcaatataccaatcaccagtgacagccttcaaacctttaaggttggtcgcaaaattgttgagcgtaatagcaatattaaatgtcttggtcaatgatgggttttcaactgaagttgctgtgacagtgagatgacctttgtgaagggctttgagagaaagtttattgtcatgttcagtataggacaccaaacttggatcacttactgtccatgtcacatcttgctcttcagaagccggtgcgaggtaaacctgcaagtccttactttgaccaacttcaagagccaaatgacctgcaactgtggtgttcatagcaacagccttagtaacttccttcttgtcagtccaagtactcttaattgggtagatagcaatatttgctttggctggaccaccttcaaccaagacactggctccaacggctcttgggcttgggaaaatctgattagcaccagctaccgtattgcccttagcaaagacttccacactcgcacggtccacataaagatgcaaatcaattgaaccatcttcattgcgagtcacttgttgactattaaccttagcaaaagcatctgaaaggatagtaccagattggctacggtcaatagacaaagtttccttagttaaatcgtaaacgactttggtagcttgaccatcaccgacgcgaaggttaaatccaactgctgtcgtgtccttacctagtacaaagtgagaaaccacttcataagtgtcacctttgaaatctttaagtaattcgttatcagaagccactgtgacattttcaaaatactgagcattttctgtgtcacgaaggctttcgtatgccttaacaggggtttgggttaagaggtaacggtcgcctgatttaaccaaaccaaggtcaaggttaaggttaaaggtaccattaaatttttgacctacagtatctgcaaccagattgcaataatcttcccaggtgttcatccagttgatttcagtcaattgtgggatgtttggatggtcagctgttccaaaatcatgaacataataagtcatggcagcataggaatccttaccaaaattcatggtttcgtcatggtcttggtaaacatcatcagctacaaaggcccacttgccatccacttgtttaaaatcaccaaccttgtaagaacgaccgccacgtgagaggacccatttgagtgcgccatcattggcaacaatcggatagaggtcaggacattccgtatgcaaatccttataggtcgtttccacttgccagttctttaagtcttgtgaagaataaatacggagtggaccacctgcaaggaccataaaccattggttatcccagcggaagaccttagggtcacggaaatcttggttttgaagtgggtcctgagaccagtcggcaactaccttatcatatttttgccaagttctaccctcgtcctcactataggcaatttcaatccgttgcccattaccatttgaagtaataatagccaccaggccaccttccggagatttgaagaggcctgagctattggtactatcaaccacgacagagcctgagaacatgtgacctgtcgcatctggataaaaggctatcggctcttcatcccaatgaagcaagtctcggctggtcgcatgggcccagtgcattggcccccatttggtatcatcgtaaaattgatagaagagatggtaacgtcccttgtagaagaccaagccattagggtcattagcccagccatccttgagagaataatgatactgatcacgataaagctcattgtagtacacatcatcactttgtctacggtggatattaacacgataagtcaaggtcacaggacggcctagtgaatcagtcatactactttcaataataaagtaattggcacctacagccactggcaattgtgaaacatctgtgtagacatttcccttggcatcctctaccttgataacagcatttggattatgcttagtgatgtcaaagcctactgtctcagcattgtgtcccacatattggatatggagtggttcttcagagaagaattgggcttgtttttcaacagaacctgtctttgaggtcaccacaagattgtcaatcaaaggaagactggtagcatcaagattaacatagcgggtatttttgaaaatgacattggcattccaattaagaagtccaaagtaaccttctggaaggacttgaggttggcccttgtcacttttttgaaggacagcgtcacctgtacttgcgacaagcacatcattaacatagtaagatagccactgattagccgcaactactctaagattgtaggtttcatcggcagttggtgttacatctttttcgtctacaagttgaatatcatgattattgacccaacgccaaaacttaaccttatggttaccagagtctacattgaccccgtacatatttttatcgctactatcattattaccacggaaaatgagggcagcggcaccaccagcttccttgaaggttacatctgttgaatagataaaattcttgccctcggattgagaataaaggaaagagtctcccttgtctttggcttctgaatgaataccatcagcctgcatttcccagtggccattttggtctgcggtcatcccttctagattggtaaccgcttcattattaggcaaatccgttttttctgctgtcacatgaacaggactggtgctattcgttacaactggagattgttcttgactggtctgattcaaatcggcttcttgcgcttggttagtcactttctcagcctcactagcctgtgtttgtacttcttttgactggtcagggctaggctgagtgggattctcttgagctgttttagcagattcggaaacaagggaggggctcagctctaccacttgggggacttccttggtcgtgctaggagcaagctccgcttgaggggtaacttgatggtcagtttgagctaccacttcttgagatacttggctcacagttgcctgttccacttggtccgcatagacaggaccagccagggccaaacctgcaaaacttaccaaggcacagccgtagacccaagtcttcccacttttgcgcataaaccaatttttacaaacagtatcattcatgactcttctccttctttagagtaacattaaatgttaactcatttttcatgaaaattcaaagtcaatacatttgcctttattaataagcctatcaaagtttccggaaatatctctaggatttacattaaaacggtaaacgtttacttttaatatcattatagcactataatctgaaaataccatctttttctgtaatttttttcatataaatgaaaaacttccgaatttgccattcgaaagtcccttacttatgtttaatctgagcctgttagcaggctatttccaataataccaatggttacaatagcaatcccaaagaatcccaaaaggctaggtagactatctccgaggaagaggcatccacccaagagggtaaagagaacttcaccagcctgagtagcctcaaccactgccagttgcttatggttatgcttaactagattagtcgcctcgaagaaaagcaaggttgcgacaaccccagaaaagacagccacaattaaagactgtaaaatctgtccgcctgatggaagacctgcatctgcaccagcaaaaactgacaaaagcaaccaaaaaggtgtactcatcaaggtcatcccaaacacgcgctgcgtcgttgaaagctgatcctgcttacagtggaccatcatcttacgattgcccaaaggataggcaaaagcagccagtaaaatcaagagactagcacgaaccacactgctaccaagaccactaccaaagtaaggaatctgaatgagaataatccctaaaaggatgaccaatgtcataagcagttgtttaccaggtaccctctgcccaaagagaggggtcaagagcagaccagctagaatcgtaatctgccaagtagccgccacaaaccaggactcgccataaatggacgctagagacaggggcccataaaaaagcccaaaaccaaccgtactccagaccaaccaggtcaagggtgctttcttaatggcagacaaaacacctgccagctcacccttacgccaggccaaaatagccagcatgggcaagctaaacaaatagcgtagactagcactccacatccaggacccacctgaaaggttcatactacggttgaaaataaaagtaaaagcaaaaaagagggcaccaagaataccataccaaagagccctcgcaaattgagattgtttcataattgtaaactcctgtaattattctattgtacagtatttagagcaataaaaaaaggaggtcatcataatgacttcctttaatcgtatacagttttccttaagaatcaagtaagcaacctgtatcttagtcacctcttagctgtacttgtgtacgggctagtaggtctcccagatgtctcttatctttcctaaaaatcgtcattgccagtagcaaaactgcgagtagagtcgctgaaaatgagaggataatggataacacatcaaaatcactatataagccatgaatcgtgcccatatgaccgagttgccaaggtaaaaatttgatgacatttctaatcaagctagcctgcactgtttttttctggtagaccagttcaagtccagcttttaccttcccaaaactgccatcatttttataatccaagaatgtgaaaaggagcgtgattggcaaaacagaggtgaaaaatacaagccactgcgacagaatttctgtaaactctgggacaccattaaaaaagatgatgtaaataagcatcgaactaaaaaacagaagaactaaataagctagaatgaaaagataatcaaagagaaattcaatcattctttttttaaacggaataggatttattactataattttcatcatcgtctcatcctttctcatctccaattataacatttttaatatttgagaagaaaatctgctggctagcgccctcgcaaatcaagattgtttcatacattgtaaactcctgtagattctactatacactacttctattatggcttttggactttatttcaattttacgttatattattattaaaaaactaaatcataaggaattatgtatgtcagaagatattaaaatcgagattggaaaaagaattcgtgaagaacgtgaacgtcaagggttaacacgtgagcaagtttgtgatactgaagaagaattaaccgtcaaacagttgatgagaatcgagcttggacgttctttaccaaccattgtcaaactacagtatatcagtgataaattaggagtttccctcaactatttgttaggtgaaacaaaactagatattcctgaggagtattatcaggctaaatataaactcatgaagtctcctgtctatggcgacctcgagcgtatcaagaaaaaactacaagatattgaagaactttatgaaaaatatattgatattctaccagaggacgaacttttaaccattgatatcattgaaagaaccctgaattttatatctgaagaaaagaaagaagatcttgttgaaattgtatttgaagactatttgaatcaggtattgaaaaaagaagagtacaccttgaatgaccttttgctaattaaatactatacctttcaatgtcaaattggtgactatgataaagaaattgttgaaagttttcgatgtaaattaattaatcaagaattacaaggggaagagttagttaatgttgaactacttggagcattgtcaactataggtggaatctatgttatgcatcatgattatagaaatatgaaaactattgtcgataaaatgcatactgttatcgataagactctacaacatgcttacaaacccgccgtactcatttttgaagcaaaatactatttatattatgaaaataatattgagaaagcaaccgaactctataatacggcaactgttctggccgaagcttttggtgaccaagtcttcatcaaaaatcttaaaatggaaataaataatgatttaaatacaagtaacgaatcaaagtgacatagatgtccttttgattcgttatttttttgtttatactcgttcatataatcaaataggagaaatcaagatatgacaaaccttatcgtagcaaaacagttaaccaaagaatttcaaaaatataaagcaatagaaaatctaaacttcacagttgaagaaggtgaaattctaggtttccttggaccatcaggttctggtaaaacgacaacaatcaatatcttaacaggtcaactcactcctagtcagggagaaacttatattttgggcaaaccgtcccttcagttaaaagaagatgatttgtcaaagattggtttaatcaccgaaaatagtggtttttatgaaaaattgacactttatgacaatcttctattttttgcaaaactctataatgtttcgacagagtatgttgatgatttgttaaaacgtgtaggtctttatgatcatcgtaaaaccttggcagaaaagctctccacagggatgaaacaacgaatgcttttagtgagagctatcataaacaagccaaaagttctctttcttgatgaacctacttctggtctagatccatcaacgtctcaaaccattcatgctcttattgaagaactaaaacaacaaggaacaaccatttttttgacgacacatgacatgcacgaagctaccattttatgcgataagattgtacttttaaataaaggaaagattgtcgaagaggggaaacctgctgaacttattcagaaatataatacaaataaaatggtaaaagtgacctactgttcaggtcaagagaaagtgattcccttctctgaattgaatcatattactgctactcaagatattcaaaccatccattcatgtgaaccaactttagaagacatcttcattcaacttacaggaggaaaacttaatgtttaaccaattcaaatctttactatggcttagaaaacgagtaatcaaatctaacaaaaccattatcctacaaatcctccttcctttaggatttgcctttctctacaaacatatctatgagattcaaggtagcctaaacaactcaatgaaagtcaatctattagtcaactgtttagccctatctttgagtttatcagttggaaatccaatcagtactattgtttccgaagaaaaggaaaaaaatattttaagaaccttgtttttaagtggtgttaacagtaaaaactatattctttcagttttattttatccagtgcttattagcttagttatgacaactgctattccgagaatactcgaacttaatattgaaaataattatggtccatatcttatcatctcgcttgctacagctttagtaatgatgctgattaatcttttcatcggattaatcagtaaaacgcaagtatctgcccaagtaattagccttccagtatcaatgattagtatgtttattccaatgctttcagggatcagtaaagattttgataatgtcacgaagtacagttatatgggccttttcacaaaatctataagccagcttgaaacctttaagtggcaagaccaaatagcaagctcactttctctactagcttggttactcctctttactgcactgaccattttacaatctaagagattacgaaaaatatcttaattcaaaaccacaaccatctaacactcagtctagatggttgttttgtttattcccttcttttcttctaactataaaacaaacaacttcttatagtcttttcattcacatgattttaaggtatattattatataattaaaactcaagggaaatacagatgtccgaagatattaaaatcgagattggaaaaagaatccgtgaagaacgtgaacgtcaaggattaacacgtgagcacgtttgtgataccgaagaagaattaactgtcaaacagttgatgagaatcgagctcggacgttctttaccaaccattgtcaaactgcaatacatcagtgataaattgggtgtttccctcaactttttgttaggtgaaacaaaactagacattcctgaagactattatcatgctaaatataaactcatgaagtctcctgtctatggcgattctgaacgtatcaagaaaaaactacaagatattgaagaactttatgaaaaatatattgatattctaccagaagaagaacttttaaccatcgatatcattgaaagaaccctgaattttatatctgaagaaaagaaagaagatcttgttgagattgtatttgaagactatttgaatcaggtattgaaaaaagaagagtacaccttgaatgaccttttgttgataaaatactactctgtacaatgtcaagggtcttcatatgataaagctacaattgagcatttccgaatgaagttaataaaacaaagattgcaaggtgatgaattatccaatgtggaactattaggggctttatcagctatagctgggatttatgttatgcatcatgactataaaaacatgaaaactattgttgataaaatgtacgaggtcatgcattctattatgcaacattcctatcaacctgggatagcaatgcttgaagcaaaatattatctgttctatgagaacaatagagataaagcaaatgagctatataataaagctaccgtactagctgaagcttttggtgatcaagtcttcataaaaaatcttaaaatggaaatggaaaaagatttaaacataaaatagaaaatatatcatcaacattttaaacatgattcattccaaatgtaataactaccaaagaagcatctgaagttaaactcagatgcttcttatctttcctgaatatcgttgagtaaacgaaagtttttcggcaacgaatttttgagtgaaatcattgtcttctctcaaatcccttaaacgtcggtacatcaatctttctcctaaggaaaagtatagaggaaaaattttatgtattgtcctaattgaacaatatgaaatatactcaataatatccactagtattcaagtatattgattgatgctttattgtttgaaacagaaaaataataaagtatattccatttatagagggttgatatgtcttatttatattatttgtaggtatttatttactttatttgataataactcttgatccatgtttaaagtaccagttatgataagaggttccagaaatgttagacctgtcaaatactgaatcgtagtgataggctttaaaatctcttcaattgttacatggaagcggccgtttctcgtgtagtcatcttgcccagctccaaaactagctaccaacatgacgtccttgccttgtaaggcagtaccagtcgaaccataggcccaaccgtattcaaaaacaacgtcaaaccactgtttcatgagggctggcgtttggtaccaataaattgggaactggagtacaatgcgatcacttacctctagaatcttttgctccgttttgacatcaatgtcaaaattgggatacagttggtacatatctcgcacgtcataaccagctccagcagcagctgttgccagttctttattaatgcgtgagcccgtttttaattgagggtgaaatgtaaaaattgtggttttcatatcgtttctctttcttatcttaattatgcttgaccttccttagacacaaaccatacatcaaaaacgcactagaaacacattactcaaatgcaaaattggaggggatcaataagcttatcaaagacatcaaacgtctgggcttcggttttagaaactttattaactttaggaagcgtgttttcatcactctgaacatacaaaaagagaaaacctatcaggttctctctagatgttagcttttcgtcacccactacagttgacaaagagccatatttaacctgtctacttgacagggggcatatcaatcatagcgggtggtttatttgtttcgcaccttcggagcgaaacagactaatagtcacataatcataaccacccgtctaacgggtggtttgatcaagggctataagcccataataccagccagcgcctaaagacgctggctttcactttgttcaagccttattgcttttgactcgtcacaagcctctcaaagaggcattcgcattacttaccattatccctgaagggattttcatattcttttacgcttaatttgtccaaagcgatatcatgcttctcttgttcctgaatatatttcttaattgtggcttcattaagtcctaccgtacttacataataaccttctgcccaaaaatgtctgttaccaaatttatattttaaattggcgtgtttatcaaacatcatcaatgcacttttaccttttaaatatcccataaaactagctacactcattcgtggtggaatacttactagcatatgaacatgatctggcattaagtggccttctattatttcaacgcctttatattggcatagtctatgaaaaatctctcccagactactcctatattgattatagattatttttcgtctatacttaggtgtaaatacaatgtggtacttacacatccattttgtatgtgataaactgtgagctttttgcaccatagtcttaactcctttcgttttacaattggcttgaacacctatattgtaactcgtttggagtttttttgttatgacggtataaccttcgatgcgcacccgcatagcgggtggtttatttgtttcgcaccttgggagcgaaacggacttaaagtcacataaaataaaaaggaattaagcaaccaaacgctacttaattccttgaaattatctcatcacctctattagcctttaaattttgatagactctattttctaattaatatgaccaatattatcaatactaaccctttcaatcaattcattagttgtcgaaactaagtacattaataaatccaaaaagagtatcaatagtaaagtaaactaaataattgagttataaatggctattttcacaaaactgtttcatcatcacactatctcagtacacaaaccatttttctatagctttgtcttaatcttgatcttttttctttaatccaagaaacgcacctaaggtaaacattattccggcaactaatgacatgaagacttcgctaactgttccggtttttggcaacctatcattgttagtagttgatttactatcaatattggtatgtttattatctatgttctctggttcattaagataaacttccttcttattttcaaagtttttatcattttcatcaggaactttagctgtgacatccttagttgaatcagatttgtgtgaatgattttctctttgtaaatcctcctttttgtaattttcatctaagtgactatgattttcttgcacgttatctttctttttcgatacatcaaaagtaggtttattttcctcctcctttttctcctctattttcttgaatacaggttttataagagtatcttttgatacattaataacatagccagcatcttttttcccttcgacaccagaaatttcccagccatcaaattgatatcctttttctaattcacccttatagacaggtaaaatgaaatcttcttccgacactatcgttgaactcatttcttttccattttgaatggtcacagttaccgtatgaggttttagttcgcttacctctcccgtatctttgtttaaaatgaattcttttacggttgtatttcttgcaaaatcttttacaacaatcttaatgtttagtgtcttatctgttagttgtttaatatcatcaaatgatttatattcttttccatttacataaatatgtttgtcttgaatctcaccatcgaatccattatttcttttatcattgatattaaagactacagattttccgtcagcatattcaatactagtatttcccttaggatcaatgtttacttctggtttaacattatcatataaaaattgatagtgtactccaaccgctttcgcattcaaatcgctatagccagtttgaagataaacatttccatccatatctgttaccttatctgggaatccgtttgctttatagtctttcattccccagtccatgatgtcaccgtctttaacattaagcttaatattaaaatctctagtgttatcaatgtgtaaatctccgtagattaaataattatctacaaccgattcattaactctcaactcccagttaaaaccacccttatcagaaatcttacctcttaaataaaattctggatttcgtacataaattttattagatttagatggattaaagtagttcttgtccattgaaagatttactggttttgcatcaataaataacatagagccatcttcttttatagcttctacgttggactcatcctccccatgatactctttatcatctttaccaaataataccagtttagaagaatctgttacaagatttccatctttatcgattgcctcccctttatcattcattttaaaggtaaacacttgatattttacaatgttaaagccatccaaagccgacattaatactgattgagtacttcttccatcttcaacatttctactatcagcataaattattttttctgataggactcttagattaggattggccttttgtatttttgctatatcttcctggctataaactccatttccttctaacatatccgtttttccaggattataggtagtcacttttagtgcatagccttttcttagaatgatgttatcctttaacagatattgttgtttttctgaatcagaatagattttaccagattccatttccgttaaattgtttggtttgttctttgaaagatcaccttctcctaattctattacattcccataacttgatgtatagggatattctgttttagtttccttatttttttcaggcattctaattttagtttcagcttttatctgatcatcatctttaacaaagaatctcatatctcctgcaaaagctaatccatccacaatatcattaatattagcgtataaatcaaatgtcatcgtttttgagtggaaatcatacttagtcgttttgatttctacagatctatagttattgccgtaatataccttggaatttttagaaacattacttatctttccaagaatttcaaagtgtccatctttagacgggcttagaacaccataaatttttgatttgatttcgtcaagtttttcagtttcatattgtaaggcactaccatcgtcataagcaatgatatttcccttatcatcgtatttataatcgtattcctctgttctcttaccagtttcacttgtaaagtcatcaacttctctaaatttctttttaatgagtttctttaagtctttactttcaaaatctctaattgttgaaatagttttatgaatagtcaagcttgatttttcttcgatagactcttcattttcttgatgattttcttcctcagttgtatcttttttaagactatcctcttttctattttctaaatttttaaatttagattcggaaatctcgccaagcttttggtatttagatgaatcttgatcaggatctactagataataggaaatcatccccttttcatcagcatgatcagcaaatttaattctatgaatctttgtgaaattgctagatccatctaatgcaatgacttcaatgatttttcctcttaaatctcctgcaccattaatttcataaatagtatttccgtctttgtctagtttcctatttcttccttgaccctcacctgcataagttacttcaagatttttctcaacctctccatcttcattaaccagagcagcgcctgcataccaaacttcgtttgcaatctcgtcaaatttttcaggatgttctttttgatctctcgcaaataaggtttcattcttgtattgatcttttaccttgtgataagtatcctttgtaatcaacttaattttttcaggatttgaaaaatcaaccgaaacaatcttaggggctgtattatcaatttttacaggaatataggaaacctgccatgggtaatctttagttaatctatatttaaatttatagaaatattgaccttctgcaatcggttcaaattgtcctcttatcttagtagcaggatctttggtatccttgctttctggtgcattttcttctctacctctagggttatagatgagtccatcccatttcaagtcgctccaaacttttagcttagaagatttgattccctttgcatcatttctcttagagtttaaaattcctctaataaagtgttctctcgaaatgacttttaagtctctttgattttctccctctttatttgtatttactattgaaatcaatccttcttctgcacttcttaatacaagtggagaaggtgttaatcctctcccaagttgagcatcttgaggatttccatttgaatctaaaggataaattttagcaatattagaaccacttgatgatggtgcgttgatcccttcgttattgaaagcaaacaattctggattttgatctagggatgttgtatttttatcttttctattttgtataactcctgctggattaaatttatctataccttctccaccaatccccttatttaaggttcctggaattttcggtttgccatcatcatcataaccttccattgtttttgattttgaaccttcttcccaggcccatttatcaaggattggttcgtggttccaattcccagcaaatcccattagaggcatcgataaagaaggttggaagtttattttcttcccgttggagttcagagcttccatttcttccactgactcaaaatgaataaatgattctacaaatttatttttgtttttagcctccccaacatttataaccgcatttaaatcaaagctagaatttggacctatagtgaaagtgtcatgctcaaatgtaatatttgctcctttgattttttctgggtggatttctggaacaatttgcttaccatctggagatttttcatctttgtatgtttcatccagtttgagtctgtcagttagagcatctgtagttatagcagatgctgaaactttaaaggttaaaggtctgtttgatgtattgtgaagcttaattgtaaaatattttttatctccttttatttctttaagagaaatagaaccataagagtttaccaaacctttagaatccgtgtttttaaaagtagctacgacttcatttctcaaagcattggcaacattaattagccctgctccctgttgtctaggtgatgcaaaatattgacttttttctttccaagaagttgcatccatcatagggcgtgcagtattttgtagggctatttttgtaagacttgtaagatctattttgtcatctcccttaagatttttcaacacaggtctttcaagcatttcctttaattttggtctaatcaaaacagtagaagctgccacgattggagttgccatactagtccctgacatataaccataagttgatttcccattaatgacattgagagtggatttaatatttttaccgggtgctgaaacatctggttttaaaagtaaatctattcttggtccccaagatgtggaccctgctggaacgatgatctcttctttatacagttctttgtctgtgtcaggtgcaaacttaaagtcaatctctttttcgtcacctacattcggtttattagaattatagcttgccatatcaattggatagtattgctccaatttatctttaaaatcttctttattattccttttaacctcagtttttttatcagggttaatcatgttccataactttacaccatcatctcctgaaattgaaaaaacttgactagtagttccttcatcctcctcatatcccatagctggaagctctgtccaattatctctattgtagtaatttacagtatttacaaccataatgccacgtgcacccttatccgttgcacgtttaaaagcattttttaactcctttgtataaattctatccattactgcaattttgcctctaagatccaatcctatcaaatctttgtcttgccccttgcctatatatacaaattttaatttactagaagcttttgatccatcttcatttgttatgattttattcttatcgaaaaaggcacctatatttctgtatttaaaactttctccacctatgttaactttatcaaactcaactgtttgatttttagcagatgcgactgctatcgcatcttcatgtgctgcagttcgtgttacatttccagtgtcggtcattttcagattattatttgccactaaatcccatgaagaacttgaagcagaagtcgcatagttacccgtagctacaaccattggaatgcctgcttttcttaatgctctaatagcttgccaatatttctcacctacaagacctgttcctgtaaagccagatgatatcgaaacaacatcgacattgtgtttgatcgaatcttcaatagcatgaaacattgtttcatctcctgcgaagccagatcctgcgtcagagtacattttataagagaaaatctgtgcattaggagcaattccatctattccgttaaagtttttaatatctttttcagtatcatttcccgcaagaatccctgcaatatgcatcccatgtggatcaaaataatcgcttccatcatcagctttttctacagtaattttaccaccattataataattgaaagcatgagggattttatcactcaaccagaaatttttatcagtaccttttaagtcttcttttttaaatctcattgagtctttagcatcatcatcaatcctcatggccttatgcctataatccgttcccgtatcgatatttgaaatgaccatacctctaccatcaaagtttttcccaaatggtgcattgatagattttaggtaatcgattgcctcttcaactccaatttcttttctagcatgattcatcataggttggactttttgtgacctttcaaccgatgaaataccttctattagtttaattatgtccagagtatctttggttgtttcaatagcgctaccgttaaaaattctatcataagtatataaaacttttgtattcttaagatttgatagttccttgattgctttttctccagattctttatctttaaattcagcaatatagacaagtttatcctcttttttgggactttctgggtctttacttgcagacgagtccactttatctccttgggattgattggaattttcttctttgatttttgcttcttcattgctagtgttattgtctatcacaggatttttactaacaacttctttttcctcaatattggaattttcttctttgatttttgcttcttcattgctagtgttattgtctatcacaggatttttactaacaacttctttttcctcaataattgttgttttcttttcttcagtatcctttgaagtttctataacattatgaatatcttcaagtttttctttgttttcgttttgtttacctattactgtttctttatcagatatttttaaagaatcttcagaactaggtgtatctgctaggattacctcattagggacatatgctgctaaaataactgcagctgtggttaatgacaatactgtactttttttcattttaattccttacatatttatttaacttccaatagatagtaaactttaactttgctagcatttgttataaaaagttttactaatactcttcgaagatcgcttcaaaccgcgtcaacgtcgtcttagcgtatgtatggttactgacttcgtcagttctatctacaacctcaaagcagtgctttgagcaacctgcggatagttttctagtttgctctttgattttcatcgagtataagtattatctaggaaatagagtagtacatttatatataattgttagctctccagaaaaatagtatatcatttaaaaaatttaagtcaagaaaaattaacctcgattaatttattttttaataagcgttaaaaacatagagtcaaaaactttcgtagttagctggggtacattatcagaacattcacaccatcaaaaatagtagcaatcaacttaaagcactagcaacatcacaaagtcaaacatcattaatgaaatatcagcgctattaaacaatataaaaaaccgctaagaataagacttaacggttatcttctacatatctattttttcaaatcctcagtcgtttatctacctataacctagactttacgagtgccttgctctaccaactgagctaaattgtataacacttttatagtatggcactctcaattttttgtcaggaagttttaaacgattttctttatcaaaatctggcaaggattttggggattccatagttgaggaaaaatctctaattttttaaaaccaacacttcgataaaagacatttgttcgatcataatctttattagagccttctgctactgttttcacttgtaaataatcaacgtttttgcgtgcttcactttctaaagtagcaagcaattgactcccaattcctctaccttgatgagctttttttacaccgagacaatcaatctctgcacaatcttcactagaataggacaagcttacaaagccaagcaaattactctcctgaaaggcgacccacacttgcaagtccttagctccttcgatgtaggcttgcgtgctttctggtattccaaaccattctggcaaatcccttaaaatctcagcgacaactgccattttttgatcttcatccttgacttctttaattacaaatatcataagttcctttcttgattttagtcttactttacctcttacgaaccagcactttcgtaggcatccaaccccctatcccagagtttgagggaaatgaaaaagaagacaagggaaatcagaatcaaaccaccgatattaaagagcccattcttgtcctgcaagaaatagctggcaggatagtaggccgtaaaggcgaaaggtacaataaagctaattaaccaacgaaggagcgaattgtaaatagaaataggatacttggcaaaatcattaaacatatagaaaatgtaaatcatggcacctgactgcttggtccaaaaagcgatgctggctgtcgcgatttttaaagaagtgtaaatcaaggtcgcaaaaggaatacaaactaggaaaagcaggaattttggaagagtccaagagatgcttgatactgttgttcccaatagaatgcaaccgaccaaaagttcccccaaggcatcaatctgaaaggtctcaaccagaatatgaaagagagggttgataggacgagtcaaatacttgtcaaactccccttttcgaactagtcgttgacctaaagcccagagattgtcaaaaaagagatgatctaatcccttgggaattaaggaaaatccatagataaaggcaatctcttgaaaggtccaaccttctagcgaggggatgtgttgaaagatgacattgagaaacaagaggttcagaccttgagtcagaaagactcccaagacacctactacaaaatcaaccttgtattccatgatttgcttgatgtattgtctgataaaaatcagatgcatgcgttgatattttttcatactaacctccttgaatagtgataaatgactggactcgtttccaaatcaactgagacaagcccaccatcactataagccagaagaactgaagcaaaagcgcttgaagaatctgactggcatcgtatttcccaacaatgatcataaccggagtgtaaatcaaggatgaaaaaggcaagaaggagagaatagctgaaaccacctttggaaagaaagccaagggaatcaaacttccagacataaaggccactatggaagtcttgagtagattggaaccccaaagatttttaaagacaaaggctgaaaatccaaagcagatgttaaagaaaaagttaatcagataagccagagttaagctaaagagataaaggacagttaatcccagcacttctacaataccttgcccagataagattttcatcaaaacaatgacacttaaaaatggcagtccaacagagataaaaatcaaccacttggagccaagttcggtgaaaaggtaagaggccgaaaaatgcactggcctcagcaagcgcatgataatggagccatccttgacctcctccccaatcataaaggagctatcagacctggtcaaaagattggtcacaaaactcatgatgatgtagagagtgatatctgccatactgaagccctgaatcaaaggctcctgggaggagtcaaagactgccttccagagataaaaggccacaaaagcccccatgacatcaccaatccgatagagaataaagttgactcgataggtaatcaactcctgaatccctgcattgataaagggtttataacgtctccacaatttgaccatcttagagctcctttcgatagaagcgacggataatatcttcaatatctgtatctaccatcttcaaatcacggacttcaaaatcagataaggtttgcttgataatatcggctgactggtagcgggaactatcgaattcaatattgagagtatttccttgtctatcaatggacatatcaggcaagccctcataatgagagacgagatgattttgacctggtgtcaggtcaaaggagagagtcttcatctttccaaaggtctccttgagctggctcaccgttccatcaaaaatctcttgccccttatcaatcataaaaatccgatcacagagttgctcaatatcactcaaatcatgagtagtcaagagaatagttgtctcttcctcctgattaatctgagtaatggcccgacgaatgttgtccttgaccgacacatccaaaccaatagtcggctcatctaaaaagagaactttgggattgtgaagcaaggaagccgcaatatccgcccgcattcgttgacctagcgaaagagtccgcacgggatccttgataaagtccttcaaatccaagacttcattcaaaaaatccatgcgcttgtggaagagcgagtctgggacatcgtaaatctccttcaaaaccgtgtaagtctcttgcagggccaagtcccaccatagctgagttcgttgtccaaaaacaaccccaatatccttgacataatcctggcgattatcctgtggaatcttgccattaatccgacaaaaaccagatgtcggtttcaaaattcctgtcagcattttaatggtggtcgacttcccagcaccatttgccccgataaaacctagaatctgccccttgggcacctcaaaggtcaaatccttgaccgcttcaaaggtctgcttttcaggatgaataaaggaacgccaagcccccttcaaccccggttccttgactgtcttcacaaaatttttctgaagatgtttcacttctatcattgccatatctatctcctacagtaaaaaatcaacaaaccgtgtcctctaaacacaaaaagccaatttctcatctcctaaaatctcccttctttatcacagcagaagaccttagtattactctattataaagcagttaaaaaaggaaaccaagtgttattctctcaaaagagaaaatagttttgatacttgaaaaaatcaaaaaaatctgtctaattcactaaacaaaatgacacaattcaataattcatcaaagcctctacatattcctgtagaggctcatttcaacttctctcattcttgcttgtgaatgtttagatagattataagccacaaaaaagccaccatatggtgacctttaattaataaaatttcttttataaacttctcctcaccccaaccagtctttttctttggcaatgcggacggcttctgttcggttgcctgcatcgagtttagtcaggatggctgtcatgtaatttcggacagtcccgtttgagagaaagagactttcggcgatttcttggttggttgatccttgagcaaccatggccaagacttcttgttcacgttggctgagtggattattgtcaaaggcgacaccttcgacaagctctggtgagtactccttttgacctgctaggacggtatggatggtcgccatgaggtcactgatggaacgctcttttagcacataggcatccacgtgggctgctagggctcgtttgaaatagccctttcgtttgaaggtggtcactataacgaccttcgtttctctttggttgctacggatccactcaagaacatcaaggcctgttttaactggcatttcaatgtctaaaatggccacatcgacttcttctttttctaagagagtaatggcttcttggccatcactggccgcaaggacatcttcgacatcgtcttccaacataagaagttggcagagagcatccctcaacattgactggtcttcggcgactaataatttcatgcttttcctccctctttcaaatgcacacgaataatggttggatgcgattgagacaggatttccaagtctccatctaccaaactgagacgttccctgatactgtgtagctcttgtcctgtgacttccttgaagccacaaccatcatcctcgaactcaagcactataccatgatcacgtcttagacgaatctgacagctttcagcctgactatgtttgataacattattggccagttcacgaagcaccatggacaaggtcgactggctaacgggcgacagactttctaagtcaaggctactatccacggtcaagacaatatcagataggtcaaagagtcgctcgagctccagtaactcctcagctaccgttcggtacttgagcttattgacaatctcacgcacctcgtacatggagtcacgactaatctgattcaattcttccagattcttcctagcagcatcatactgctccttgtccatctgttttagagccaactcagttttgagactcatcatggcaaaggtgtgtcctaaggtatcgtgcaaatcacggccgatacgattgcgttcattttcagctgacaagatattgatggtccggttctgctccgcaagggcttcttccatctttctctcctgacgcatacggctttgaaaatagtacattcccaaagaaaaaagagtaatagccagggacatgaggtgggtactcaaatcgtctgtcagttggaaggatgatgacgtcaaaatcaagagcgtcgctagaaaggaaaagaatcgataagaagatatactatcctcaaagcgccaaacgagaaggttaacattgaaaaaaacaaaccacatcatgccaccctggaaggtcacggacataaagataatgtaagctagagtgtaaaaccacagaaagggaatccacttgctataagcttttttcaaatacactataaggagataagcgatggtaaacagacccgtcaaaactagggtccagactgggaaatacccaccaaacactcctaagattgggaaaacaaggaaaatcagactaacaaaataagcgaaatcattcttctggtaacttctaaacatggtcactttctctgtacgatttgataaaaagggctaagcctgtagctattgtagcatagaccaagataaaaatgagcgatttccatgaaaattcccctttttttgcgaaattgactactaactgattgatatgatagatgggtgtccactccgaaatgtgctgaacccattttggaaacatggttactggcatccaagaaccaccgataatagcaagaccaagaaagacgatatttccgacgatagccatgatttgttgagacttaatttgggcaaggagcaagccaaaggataggaagactaggcttgacaagagtaaaagagcccctgaaccaagccaatgtgataatggcatcttaacatcacgcacaaaagctcccacacagaaagtcactaggatagcaaccataaagttcataagaactcgaaagattttagagaggtaataggattgaatactgatttttgaatgttcgatgtaagttaaccagtgatcggtttgatcctctctaagcatgtaggggaaggtaaagaaaccaaagctagacatagaaaatccagtcatggtcaacatataagacaagataaaggctttttgtgattcagggtcaggactcatttccatacctgaatacaagaggaagaatccgacgggcattccgatggacatgatgaagactggccaactgcgccatgtttttatccattcgattttaagtagtgctttcatgccttgtcctcccttgtgctatcaaataggctatctaaaagtgtcttgttttgaatttcaatgtcagaaatgcgacagccttgagcttgtaaactactccaaatactttcaatatctttagtcataaaggtgacaacatcacgtttttcagtcacatcataaatggctgccagtttgtcaagacttggtgcaaagcgactcggtaaggtgacttgtttttccttttcctcgctacgcatagcatgtggcgtagtatccctgatgagttttccctgatgaagaaccaaaatgcggtcagctgtgtgttccacttcttcgatatagtgggacgaataaagaatagtcacacctgactttttcagatcattgatgatttcccaaaagcgttggcgtgtcgtagtgtccatccctgctgtcggttcatctaaaaagagaatgtcaggcttgccaataagacagaggacaaaggcaagaagacgtttttgtccccctgagagtttgtctgcgaactgctgatactggtcgtctttgaattgtaagagtgcttgaatttcttctttagataagccattttcagaaatatcttggaaaaatgtaatcaattccatgacttttaattgagagggaatggtattttcttggagaaggaccgcaatctgatcttgtgctttcccctttttacccttgataaggacttgaccgctactggctttcttgtcaccaagaatacaggacattaaggtcgttttaccagcaccattgggcccgattaaggcaagacagtcgccttgtcccacctcaaagctaatattgtctaaaattgtttttcctttgatttttttgacaagatttgtgacttgaaggattgcttcactcatgtgtgtgatttcctttcttttgatagaaggctaaaaaaacataacaagctgcaacagacacacccatgacactgtagagaatatcactactgccatgaagtaggacataggcaaagaggatggtccaaattaccgctaggagcatgatgcttagtattttcaataatttcatactgggcctcctagtttttcaattcattaatgacaaggtcgataaaacttttagccatagtgataagaatgtaagctgagatagacaagccaataatcatccccaaatttgagaagatagcgtcaaagttccctttttcaaagatgtcagtaaacatgctaagtccagcaaagacagttccgataacagcgtagataaggtaagatgttttgattttcatgagatgacctctttcgttttttattatttctaagttatgactaaagtatatctttttggtcattctctttttagcaccagatgtcatgacatgacatgacatttgtcatgtgacgtaaaaaagccgacctaaggtcagctttctatagtctaatatctctcagcaagttcgtaataagtgcggacgacatgtcctttataatgcactctgactttccgtagccaaaggctatcacctttttcaagggtatagaagtcatctcgactaacgaaaaagttacgttttgcctcaccaactttaacgactaggaaatgattggtactcgttcttggtgccttagcaattctctttccaacgatgacacctactacctttgaccagtcctcgctataatagcccatcttggttaaaataaatagaagaaatttatccgttagtatccaaataccagaagaaagagcaagtacgaaaaaaataaatattactgtcaccaagcccagactaccactctcacgtccactgtcaaaccagagatgcaaacctttctcatttccaaaatacagcagggctagaaaaatacctgtaaggaggagagagaagactctttcaatatttctcaaaataaaatctttcatgtctctactccttttctaccgtagtgtagctaccattttcactcttgatagcaatatctgatgacatggctactgataaagtaatgggaccacgaacttggccatcagtatctctgagttcccaattgctaccgtcattgcttgtggctaaccccttgtcttcttgtccattttcataaactggcaggacataaacctctgtcacccccggtagttcttgatgctgtcctgtcgagctgtcctcaatcacaaaggttgaactagcttggtcatagaccactttctttgtatcagaaatgggcttgtctgattttttagccaaatcagatatggctgaagctgccttatctaccgttccctgtgagaccagttcatttcctgtaaggcctgtgatgacctctattttcttaggttgcgatttctgcatctctctggtgaaaaagccattggctaggaaaaaaataccacataccatgactagaaaggataagacaatcacccctccacctgtccgtgtgggctctgtcacttctgtcattggacgaagaggaggtccttgccaagcggtctttttgtgtctcttatccaagaggtcacaaaggtagtcttccaacaatgcgaagccataatccttggctagactttcaaccccttctaaggtctcataacttagaccacctctttcaagtatagcaccaatagtcttggtaaaacggtaggcaaaatcctgatcctccaaccagcccaaagcagcacactcactcatatcatctttgagtttagaaatagtcagagtattatataggaaatatagctcaacagtctgaagaaaactatcctgcttttcgatagctaaatcttcatttaggacagaatcctcgcgagtccttgaatgaggctcactatgattgaacatttcatgagtatctgataaagttagctcatccaactgctcctgttcttcttcctcagagttcaactgctgaacctcatattcagtcacttgctcgtcgttaactttttcagttgcataatctgtaagctcaagttcatcaaaactttcttgcccttgaccagacttgctactatctggtgcttgttttaaggaagcttctagctgagaggcagacaccatcccaaccacgctgccatcggtctgtttatagcctatgacagcactcacatcctcatttccagattgcgatttttgccaggcaagggcctcttgataagccttttgcaggcgttggaaattttcagggtcatcctcagggtgatagaccttactctgtttggcataggctctcttgatgtccttaagattattggttggttgaatgcctaaaatcgaccaaaaattcatatgtcacctcctatctccagaaattagggtcatcagacctatcaaagggctcaccattctcctcatggtcgtctttttcttgacggaaaatatccaaatcatctagtgacatgatattttcaatgctatcaagataagcttggtagcgtttcacgatttcttttcgcttcttaatattgttaatagccaactgatagcctttttcaaaatcttccatctgccacaaaaaatgtagttgcatcttataaggcatctccatgactaaacgataggcacgctcagactgcgttttaaagtcggcctcaaaggacaattgatcagagacaagtttaatattctcaaggtgctcactcttgtcgacctcttcgattttactttgactaccgatacgatacgttttagtctcgcctgttgaccccagtttaacctctatatagagcatggaattaatatcgtaagtaaaggtggtctcaaaaaactctgtcttagtcgcagtcccaggaacatcgataataaactcatccaaaaaaagatttgcctcaggatcaagcgattctccctgataaatcataaagcgacattgtttctgtccccgactggcataataatatttgctggctgaggtcggtaggacagacaacttattaataacctttgaaaagatatttttatcaaagtcagagtcataggcactgattcccaatgagaaaggacaaatatcagtaatcaccaaatctttgaccttttcctgacgctctttgacagctaaataagtccccaaaccacgcgcaaccaactcatccatatccttcaaacgcttaataggaagattgagaagattcgtgatataggattgaaccaaaggcatcatgctagacccaccgaccaagataaaggcatctagctcatgagccctgtagccgctatcactcaccgctctaccaatgactttcttaacacgatcaagaacaggttgaataatggacttaagctcagcttgagtatattgtttcatgtaatattggtcatcgtaagttaaggagactgcagccaatttttccttttgtagcttgagcttgcaacgttctgaagacaagaggagactagacttttgcttggtgtctaacttctccaaatcaatcccttgagactgacaaaaatcttcagcgatagccttatcaaagtcgctaccacccaagaaattatcacctgcaatggaaacgattgaaatcacattatcaaaacaatcaaccacagaaacatcaagcgttcctcctccaaagtcgaagacgatgaaagactcgtccttgccaatcttgtgacaagaaatggctgccgcagaaggctcgttaatcaatcgttccactttaatacccaatcgttgtccgatagccttggtcgctgaacgttgtttctcgttaaaataagccggcacactaatgagcacctcatctactttttcacctaagtaactctccgcatcagctactaattgtttaaccaccaaagttgacaaatcagttgccgagaaagcttctctatcaaggtaaaagatttcattggttcccattgaacgcttaaagagttgagccgtattttcaggatcagtcactaagcgttccttcgcaatttttccaaccgtcaagacatcgtcagacacatggaccacgctaggcgtcaaatattcgccaaaaccatttggaatcagctcaacctcaccttcacgataggtaaccgctagactattagtcgtccccaaatcaataccaattattgccataacattctcctaaactgcttttgtccttccattataacatagtcaaaaatgtccttttcaagaagtgagtaaactatttcaaatgtgccatgaactaagaaagtaagcaaagaatgacatcacattctttttgagaacaaagtgagtataactgagacttttcactgtgataaaaaaccctgaagaacttaaacttcaggggttcggaagtttcgagaccttcgactcgaaacttaggcatggaacttctttgaagttcgctgacgtccgtcatcacctaaggaaagtctcgaaaaagattctttattaaaaaataaaagccaacccaaggtcagcttttcatttatcttactaattattttttgaatggttcttccaccatgatgagaggatggaacctgagatattgtgccaaatactaaagatagttgatgggatagcagcttgtggcacgaaatatttcatagcaagagttgctccaagacttgagtcttgcatccccacttcgaaggtaatggctttttgttggggttcttccaaaccaaggatttttgaaaatccaaaaccaagggcataaccacaaagattgtggagcataacgactggaatgacaagggctgtcgctgctgtgaaaatattagcatggttggcagaaacaactgctccaacgatcaagaggatggcagcttgtgaaatcaaaggcataatcttgatgatggcatcaattttcttaccaaagattgagtgaacaagcacacccaaaatgataggaacaaccacgatacgcaaggtactaaggaagaggctttgagcagggacgctcacgtactgaccagccaagaatgacaagagagttggaatcatgagtggggccaagagagttgagagggtttcaatagagacatccaaggcaacatccccacctgaaaggaaggccataacactagatgaagtcccacttggacaagacccaacaaggataacccctgctgctgtcgcacccttaagatggaaaatcatacaaagcaaccaagccaaaccaggcatgatgacatagtgggcaacagtcccaagaacaactggaattggacgcttagcaatacgtttaaaatcttcagtggtcaaagtaagccccataccaaagagaatcaagccaagtagataagccgtattgggaataacccaactactagttgcgggaagggcatagttaaaggccgcccagaggataacagctacagtaaaccatttgctgagccatttactaaaagatacaagtgactccataatgaaaccttctttctattttcacagaatagtatagcactttcattttgaattacaaggtaaatttcgaattttctgaaattattttcaaaaaaataaaccctcacacttaagatgtgaggattttgtgatttctataaacgttaagccttgtcttgccacttttcttcaaaatgttgagcccgttcttctccccaccatagtggcaataattcgctcaaagtaatggtttgtcgtgtttcgtagtcaaccatgaattccaagttacgattgtcgggatgcagttccattaaaaattctcgacaagccccacaaggcatgccagacgttccaccatgaggtggctggtcacgaaaggcgataattcgcttaaccttggtctgaccagactcttgatacatattgaaaagcgcagccctttcagcacatagatggaaaacaccacaagtcccttccatacaaaagcctgtgaaaatttgcccatcttcagcctcaacggcagccacaacgtgtctagcatagacaaagtctgagacttcctgtggctgatacaaggcttgagccttttcatacattttctgccaaatatccattatttctcctttaacctcgatcactttctctttgtgacttgataaagagtgcaagccctgttgctactacagtataagccaaaataaacagaagtgacttccatgaaaatttcccgtcctttgcaaaattaacgaccaactcattgacatgatagacaggcgtccactcagagatattctgaacccacttagggaacatggaaataggcatccacgaaccacccacgatagctaggccaagataggtaatatttgcaaccacagacataatctgttgagatttaatttgagcgataagcaaaccaaaagctagaaaaaccagacttgacaagagtaagagagcacctgaacctagccaacctgacaaaggcaactcaacatctcgaacaaaagctcccacacaaaaggtcacaatgatagcaaccataaaattcagcaaaacacgaaagattttagaaagataatatgctgagatactgattttagaatgctcgatataggtcaaccagtgctccgtttggtcctcttgcaacatataagggaaggtgaacaaaccaaaactagacatggaaaagccagtcatggttaacatataagacagcaaaaactctttttgagtctcgggattaggtgttgagacaatgcttgagaataggaggaaaaagcctacaggcataccaattcccatgataaagactggccagctacgccatgtttttatccattcaatttttagtaatgctttcatgccttgtcctcccttgttgaatcaaataagctatccaagagtgttttattttggatttcaatatcagaaattccacagcctgctttctcaagactttgccataccttttcgatatctttggtcatgaagctgatgacatccctcttttcagtaatctcatagatatcggtcaagccatgaacgatattaacaaagctacttggaagagtgacctgcttctctttctcttcgtgtcgcatagcgtatggcgtagtatctctgatgagttttccctgatggagaactaagatgcggtcagctgtatgctctacttcttcgatatagtgagaggaatagaggatagttgtcccagcttttttcaagtcattgacaatctcccagaaacgttgacgagtggaggtatccatacccgctgtcggttcatccaagaaaaggatttttggtttatcaatcaaacaaaggacaaaagctagaagacgtctttgtccaccagagagtttgtccgcaaactgctggtactggtcttccttgaattgcaggaggtcttgcaccacttgattggtcaagggattatcagagatagactggaagaaggcaatcagctcttccacttttaaactatttggaatggtattttcctgaaggagaactgcgattttatttttggccttacctgccttaccatcaatgaggacctgaccactgcttggctttttatcgccaagaatacaggacatcaagacagtcttccctgccccattaggtccaatcaaggccacacaatctcccttgtttatctcaaaactaatctcctctaaaatggtctttcccttgatacgttttccaagagaagaaacctgaataactgtctcacccatcaatgctttcctttcttttatatagatgccatgcttgacaatatcgctgacatcattggacttcccttaatactccacttccaactccgtacagaagagacttccgctcagatgaagtctcgtttcaacttgctcgaaatcagattcgaaacgatccaccttcacagatgacagaggatgtgaaattccagtggtgtccatgacacaaccatgaggaagtcgaatatgaacttcaccaaacttagcatcaagatgaactgctacctgacttgatgcaaagctggcttgactcaaatccagccacagctcaccgaaagccatattcatatcaaccgtttcgacttcttgagaatagatgcgatacctatcctcagccatatatgtcttaacagaaatatgtggtccttcttggtcgttcttattgaccttatagtctttagtgagacctttcttttgactacggccatagagcaactctaaagccaaacctattagaaagatgccgctaaagagattccactgtgcaaaatcgaggtctaacaagtcatgaacatagggtgataagaaggccaaaccaagaaaaatgaggagaggtcgtctattcaagataccaaaacaaaagaaggccacgaagaagaccagattataattgaccatgatccaaaaatctggaataaaggcactagcaataaaacaagctgctagtaaaaacaacaagaaggaccgaagattaaatcgttccataagaaaactcctttctaaagaaatgattgcaattttccaattattttcactatcagtatagcactatttgtaaacgtattcaatgttatattaaaaggatttgcaagaaaaaaagagctttcgctctttcatcatttttcaatgtttgacagttacctgtccaaaggatactgagcctgttagagaaactgtagtgctagacaagtctcgctctcccagactatcgtagcctttcactcctgctaggcttgtatgaagcccatgtgtatccacttgccaatccttaggcactcgaatgacaacatgagaaaaattggcctgaaccacaatctgaggtcggtccgtcataaactgagcctgacgcaaatctaaagtcaaacgtccaaaatcggcattggcatagacagtttcgaggttttgtgaagtcaccacctgaacagactctgaaaataaggtcttagcaaaaatctctcgctcatgttctttagaaaccttgtaagagaagttctttttataacttggcttgctcaaacggtccaccgcaattcccaagataagaatccctacaaacagggtccattctgaatagtccaatctaaagaggtcatgaatataggttgatagaaaagccattcccaagaaaaagagaaatttccccttagattgccaactcaaaagcacaaaaagcaaggccaaaatcaacttataattaaaggccaaatacaaatctggaataaaggctgtcgcgataaaataggcagcaatgataagtagggtgataacacctgcattaaagcgtctcataacagttcctttctaaatcctatccttgagtttttccacaaaaaggtaggctgctggacagaaaagcgtatttttaatagtcagatgattgatctgatagattttcttacggtctgtgtgaggaaaggctgcacaggccttggggcggacatcatagatgtcacagagattatcaggccccaaaaatggacaaggcatggacttgaagaccttatcgccatcctcatctacttgcaagtacatctcctcgaaagcaggtaacttcatgcgaaaatgcttggcaatacgagtaatgtcctgctctgtgaagtctgggcctagtgtcttacaacaattggcacactggacacaatcaatctcctgaaaaacttcattgtgtacctgctgaacaatcttatctaaatttttaggggctttcttcttgagttgtgctagaaatttacggtgctccccctgcttttgacgtgccaattcctcgtaacgtttgacatcaatagtctgtgacatgtgttttctccgatgatttataattctttcatctattatagcataaaagaaatagagcctagcttgaactagactctatgttagttacatcgatacgattctacgataagaacgcgacgttagggcgaaaaccaagacataggctaggaagaagacgccacaaacaataatagtgaccactaacataagatttggattgagaaccccaataacacgcacaatcaaactgatcatatggtaagcaaaggctaagtgtgtaaaggcaaaaatcagagggaggaaaaagacagtaagaacttgtttacgaatggttttcttgacttgttgatcgtccaacccaatcttttgaagaataacaaagcgctcacgatcctcataaccttcagaaatctgtttatagtaaatcacgagaactgtgccaagcataaagataatggataagaaaataccgataaataaggttccgccaacaaagccatttagcatcccttctacatcatatcggctattagcagtgaggttaggcccagggacaccagtagtttgtccagctaactgttgcgtttctttatccgtgagtttgtctagcaaatctgaatttttcttggcttcatgtgtagggtctttgacgttaacaccaacataagtagattgagtggttgctgttcctttgatactttctttaaaattatccatatcaggaacgacaaggtagctataatcagaaactatggttgtaaagatattaggtactttacctttaataaagtcattaaggctttcctgaatctggtagttttgaccattgatagagacactcttttgatctttcaatattttatttttagtaaataagccaacttgatttgaagtcagattgaggtctttacctgttaattgcttataagttgcttgtgagaagacaagaaaaactgactttggtagaacttttctttcattctcagaaaagatggttagcttgtttttttcttgttctttgataccaaagtagaggtaagttacttccgtttttctatttacctgatttcccgactgtgataagaaatcatccataaccttttgtgtacttgttacatctacattcgttccggtaactgagtactcatgtggagcagcactggccaaatagtctttttttccagcatagatacttgcagcacctacaagcgtcaccagaaccatacttgagaggatagcaatggtagcaagcccaactgcgtttttcttcattcgaaagacaaggttggaaatggaaatcatattattaggcttgtaatagtagcttttcttctttttcaagagttgtagaactactgttgtcccagcgttaaagagaagataagtccctaaaatgaccagtaaaacagctaggaaaaaactgataatagccgttactggattctgaacagaaagagcaagatagtaaccatatcccatagtcccaagtcctaaaagggtttgaataactaggaagcgtccttttttctcacccttaaggccatctttagttaattgtaaaggattaagccgtagtaatcggaaaccatttaccaaaaccaacaaactaaaaatacaagcaaagatgacaagaacaataggaattgtcattacttgaaaggtcgaaaccaaaccagtactttcaccgataagcctttgaagaaaagcataaatgagtttatcgaatagcgcccctacacctatacctagaagcaaagtcacaaaacccataatcatcgtttcttttaaaatcatgctaaagaggtgacgtttctctaagcctagcacactatagagaccaagctcctttgaacgatttttcatgacaaagctgttggcataaagaacaataatcccagaggatagggcgacaatcccaagtcccaaccccaaaaccatcttgatagcatctgccccaggtaagtcatccagatgcgaattaagcgttaaagatgtaaaaatataggtaatggcaataaccagaatagttgccaatgtatacggatagtaaagcttacgattttttatgagattggacaaagccagtctattggttagacgaaacatattagttcacctcacttgccattgtagttagtgtatcggaaatttcttggaacatttgatgttcagacttatcccctttgaagatttgattataaagaataccatccttaataaacaaaacacgctgcgcacgactggcggccgctgttgagtgagttaccataagaatggtctgaccgctggcattaatagtttcaaagacatccaagagtgccgctgaagattttgaatccaaggcgcctgttggctcatctgctaagaggatttctggtttagtgatgatcgcacgcgcaactgcaaccctttgcttttgaccacctgaaatttcataagggtacttctctagcaaggaatgaattcccagttgacgactgatagcttcaacttgtgtcatcatttgcttaactgagcgtcgagaaaggaccaaaggtagcaggatattatctttaactgatagggtatctaaaagattgaaatcctggaaaacaaaccctaatctttcacgacggaaactggaagcatccttatttttaatagttgctgtgtccataccattaaggtagacacgccctgacgttggtttatcaagcatggcaagaatgttgagcagggttgattttcctgaaccagactcacccataatagcaacatactcacccttctcaaccgtaaaatggatatctttaagggcttcaacctgatttcctttgaaacgtgttttatagatttttttaacatgttgaacatctagtaacgccataataagctcctttatttaataaatttggaagagatttttggaacctcttacttaacttctgataccattttatagaaaaagcaaggtctcaaccataacccttgctttcatttctagtcttatttcttacacttttgtaagttagtaatcaatagccaacttctgcttttgaaaatgaatggaaactgtggttccttggcctacttgggagctaatactaatatcatgtccaagctgatcaacaattttcttagaaagatagagacctaacccagaggactgctgagtcagtcggccattataacctgaaaagccacgctcaaaaacccgtagaatatcactatttttaataccaatcccagaatctttaagatgcagcccgttatctttgaagtaaatttcaataccaccactttttgtgtacttcaaactatttgacaagacctgctctatgataaccaagagccatttttcatctgaaacgaccttaacatccaagtcatgtagattaatggtcaatcctttttgaataaagaaaagactatgttttctaacaacttctttaaccaagtcttctaatgtaacctgcctcaactgcaaatcatcatgaaaattctctaaacgcaaatactgcaagaccaaattggtgtaagaatcaatcttgaatacctcttgctccaagagagccctcgttttactatccgaaacatcctgaagcaataattgactagctgctattggcgtcttgatttgatgcacccaaagcgtatagtagtccatcaaatctgtatagcgcttgcgctcctcctcactctgagacaactggctctccctagcactttccaaagcttgggccaggtaaaattctaaaggacttgatggtgtgatttccccatagagaaaggctaagttataagagtgataggacctaaccaagtcccaaataaccatgataatagtcacaaatgtcattatggtcaaggcgtaataaagaatatctgccgcctcttcaaataaaaaggcaaacaagaccaatatgattccattaaaggcgaacaaaagatagaaagtcagacgagacctaatatggtatttgataaattgacacttacccatcatgacgcaacccgtagccaacacctttcttggtttcaataaaatccttcaaacccactgcctctaacttcttacgtaaacgagctacattaactgacagcgtattgtcatcaataaagaagtcactattccaaagctccttcatcaggtcttcccgactaacgatattaccagcatgatcgaaaagaacttgtaaaatctgaaactcattctttgtcaaagaaacgacctctccctgataaaccaaatccatagccttaaggttcaaaatcacacccatatattccaagagactctgatccttaccaaactcataagaacgacgcaaaagcccttgaatttttgctaggagaacattttggtcaaaaggtttagtcacaaaatcgtccccgcccatgttgattgccataacaatatccatggcctgatctctggaagacaagaacataataggcaccttggagaccttacgaatttcctgacaccaatgataaccgttgaatagaggtaaaccaatatccataagaaccaagtggggctctacttttacaaaaatagataatacttccatgaaatcttcaacaagaacaacttcgtaaccccactgttctagcatttttttgacttgttgacggataacctcgtcgtcctccactaataaaatcttatgcataactctacctctttcatttcccactattataacagaaatgctataagaaacgaccattatcagcaaatcttacaataatgttagattgaattttccaatttttaaaatagtgcgttttcataggaaaaatcctttgagtcttcaaagaaaatatagtattataatagagttgatgttggtttatcatcaaccaacgacagcttcatcgaacaatgagaacattacttatttatgtcacgaatcggcgtgacgtttctacaaggtgccgtaacacctaacaatgagtaagtcagaaagtcataaaaagattttaccgtctttttatgattttaaaggcttgctttgcaagcctttttctgttattcgatggttttgatctttgtcagagtcttaatagaatctgggaaaatcaaaatacactttagttatattttttataggaggtaatatgaaattactggaagaccgcattctcaaagatgggaatgtccttggggagaacatcctcaaagttgactctttcctcactcaccaagtggactttgacctcatgcgtgagattggaaaggtctttgctgaaaggttcaaggatgcaggcatcaccaaggtggtgactatcgaggcatctggtattgctccagccctctatgctgctgaggccttggatgtccctatgatttttgcgaagaaggctaaaaatatcaccatgaatgaagggatcctcaccgctgaggtttactccttcactaagcaggtgactagtactgtctctatcgcaagcaagttcctcactcctgaagataaggtcctcatcgttgatgatttcctagctaacggccaagctgccaaaggcttgattcaaatcattgaagaagctggtgcacacgtcgaagcggttggtatcgttattgagaaatctttccaagatggtcgtgcccttctggaagaagctggctatccagtcgtttcacttgctcgtttggatcgttttgaaaatggtcaggtcgtatttaaggaggcagacatctaatgcaaaataaagagaaacactcgcaggcggcggtcctaggactccaacacctacttgccatgtactcgggatcaatcctggtgccaatcatgattgctggagccttggggtattcagctcatgaattaacctacttgatttcaaccgacattttcatgtgtggtgtagcaaccttcctccaacttcaacttaataaatacttcggtatcggtcttccagttgttctcggggttgccttccagtcagtggcaccacttattatgattggtgagaaacacggtagcggtgctatgtttggtgcccttatcgtttcagggatttatgttatcctcgtttctggcgtcttttcaaaagtggccaatctcttcccttcgatcgttacgggatcagtcatcactactattggtttgaccctcatccctgtggctatcggaaatatgggaaataatgctgataagcctaccggtcaaagcctcttccttgctgctatcaccgttcttatcatccttgtagttaatattttcactaaaggatttatcaaatccatctcaatcttgattggtttgattgtcggtactgctatcgcagcaagcatgcacctagttgacttctcaccagtagctgcggcacctattgttcacgtgccaacgccattctacttcggggtacctaagtttgagttgtcatcaattattatgatgtgtattatcgctactgtgtctatggttgaatcaactggggtttacttggccctctctgatattaccaaagaaccactcgatagcactcgccttcgtaacggttaccgagctgaaggtatggctgttctccttggtggactcttcaataccttcccatacacaggtttttcacaaaacgttggtcttgtgaagttgtcaggtattaagactcgcttgccaatctactatgccgctggtttccttgttcttcttggactccttcctaagtttggtgccttggcacaaattatcccaagcccagtccttggtggtgcaatgcttgtcatgttcggttttgtttctatccaagggatgcaaatcttggcgcgtgttgatttcgccaacaacgaacacaacttcttgattgctgcagtatcaatcgctgcaggggttggtcttaacggtagcaacctcttcaacagcctaccaaatgctttccagatgttcttctcaaacggtatcgtggtcgcaagcttgcttgccatcgtcctcaatgccattttgaaccataacaaaaaagaaaaataaaaacgaataaactccccttatagatttactgtgtactgaccccaaaaagttagacaattaatttatccaaaggatttagttctgtattgcacagggctaaatccttttaattttaccttaatgcgtttgttgttgtaataatcaatatagtctacaatagctcgttctaattgattaagtgatttaaacgtcttctcgtaaccataaaacatttccgatttcaaaatgccaaagaaagattccatcatgccgttgtctgggctgttacccttacgtgacatggacggttggatccctttatcctctaaaaatcgatgataatactgatgttgatattgccatccctggtcactatggagaattgtatttttataatgctcctctgtgaaggcctggtttaacatagctttcacttgttctaagtttggtgaagttgaaagattataggcgataatttcactattaaagccatctaaaactggtgataagtaaagtttttgactgcttgctggaatggcaaattctgtcacatctgtatagcacttttccattggtttggttgcttcaaattggcgttgaatgagattttctgctttcttgccaatctctccttggtaagaagaatacttccgtttacgacgaattcgagcacttaaaccaagaaccttcatcagacgttgcactttcttatgatttaccatgaagccacgatttctcaatttaagagtcattcgacgatagccgtaatttcctttatgctcacaataaattgattgaatttcagctttaagctctttatctttgtcaaatccatctagttgtttcaactgatagtagtaagttgagcgagctaaaccagccgtttcaagaagtaaatctagtcgaaatcctcctgtgaccatttctctaattgtctctgcctttctcgctgtaaggcttcgtccctgtcttctagttcttttaacttttttaggtaagacacctcggtacgtaagcgttcattctcctcttggagtcgttctagttctgtcatttcttcccaagttttcttacgtttacgtcccattttaggtactctctctcttgttttttcaacaatagtatacccatttttcttgtattgtgctatccaatttttcaacagagaaggattgggtagagcataatctaaagatacactttttcgtgaacgacctttaaacaaaactttattaattatttcttcctttaattcgggagaatagtaacgattcttcccttttttgacgatttctattccgtaacgttcaatcaacctcaccatatattttagtccagaaacatccacaccaaatctttttgaaagctctttgaagcttctcccctgttttctcagtatatatatctgaatcttgtcctcataagttaatttcataataaaaacacctcaaaagttagattttttctgtctaacttttggggtgcagttcactgatccataaggggagtttttattatagtcttaacgtactgatggtatcaagatctttggtaacaatagcggtatcaaatctcacctcaaatagaatcagcgattctcctgcgtaatctatcgtctttttataatctggaacctttgcaatgaaatgttttgccatatcaactaccgttttcgaacttctttttgcgaaacctttggctttgacatgctggtttccagtgtgaggaatagtggtaaaagcgatagaaggattttcttctatttccttaactttgtcattatctttaaaggacgaaaaataaagaatgttttcacaaggatcaaaatagaaatttacgattctcacattaggaacgttattcacagaagttgccaaggctatttctgtttgttctgccattattctcaaaaattctgttttcgtgttcattttcaaagcctcatttccttagattaattatatatgaaagcctataaaatgtcagtcgagaaattgaaaggaaagtgtttctttgggcttcaaactgattgaaagcaagtcatatctatagtacaatgaaaatataaatgtttgaaaaattaatttagaaaggaaaacagaatgcacgaaacacattctctccgtgagcgattccttgttttcttcaagatttttgtgcccatactgatttatcagtttgccaacttctcggcagcctttgtggacactaccatgactggtcaatacgatgccctacacttggcgggggtagccatggcaacgagtttatggagtccttttttcaccttcttaacaggtatcgtctctgccctagttcctattatcggacaccatctaggggcaggtcgcaaggaccgagtggcacctgatttctatcaatttctttatatggctttgggcctatcacttatcctctttgccctcgtttttctaggggcaccattggttttgaatcatttaggtttggagcctttggtcagaaaggtagcccttggttatctacgctttttgagtcttgggattatcccccttctactctttagtgtggttcgctccttccttgatgcccttggcctcacgcgcctctccatgtatctcatgcttttggtcctacctctcaatggtttcttcaatttcctccttatctatggcattgctggtctaccagagttaggtggagccggggcaggtctgggaacttcattggcttactgggcccttctccttatttccatctcggttatcagaaagcataaaaaggttaagccctaccacattgaaaaggtccaaccccttgataaaacagctctacttgatgcacttaaactggggctccctattggtggaacggtctttgcagaggttgctatcttctcaggtgttggtctggttatgtcaaaatatccatccctagtgattgccagtcaccaggctgccatgaatttctcaaatctcatgtacgcctttcctctcagcatttccagtgccatggctatcattatttcctacgaatttggggccagacgcatggatgccgtcaagagctacagcaagctgggacggttgacagccctaggattttctatctttaccttgattttcctctacttcttgcgttatgatttggctgaactttatgggcatgagcctgactttttgagaatgacggccattttcatgacctatagcctcttcttccaagtggcagatgtctttgcggctccgcttcaaggaatcctgcgtggctataaagataccaaggtgcctttttatctcggtatcctaacctactggggcatcaccctcccagttggcttcctgcttgaaaaagtcactggacttggtccctatagttactggattggcctgattaccagtcttatcgtcagtggtctctgttaccaatggcgcttaaatagaatcgtcaaacgatacgaatcacaacagtaacacacctgaagcagtcttttccgactgctttttctatgtccaaatctcgataatacagaaaaaaaaactcctgcatattgaaaacagatagactattatcaatacacagaaagcttcttttgatgagtgattaattatattcagattttcctgacctattaccaaactggattcattaatgaaaacatagatgtttaatattgaaaaaagtatcacagagaccagctggatcgactagggcaccataaatcatgactaaaccacagagagctaggaaatgataaaaataaactactttctcccctgttttaggaagtaaaagaaaagaccagaaccacaagacacaaatggctattaatatgattagtttattcatccattccataataatctccgtcacaaaggcttagcacaataaaatagtccttaggactatctgaatgttatcataaaatctaacaagtactgtcattacttcttaaggaaatatcttagtatctcttgctagtcttgtttaggtaagttaagacatataaaatcatattgggaggttgggaagactcattattacacaaagtacaataatgtttacagacgccaaaaccagcaaaagctaaggagaaggaaatattgacacttgtcagatttctcactattatagtgtactatttttttatttgaaacataaaacaattttgcccaaattgttaaaaaatgtaatgaaaggtcacttttttatcctgaatggttaggttacatatcatgttaggtttaaaaggctttcatctcatttactgtttcttctgtcatgaaaaaagaggttagaaccaaggggaaccaacctctttttagtaagtaatatcattctttagattacctaatcagtccacttgatcaagcaagtaagcatagccctcttttgccatgtcagctttaggaacaaatcgtgtcgctaccccattgatacagtagcgcaagccaccctgatcacttggcccatctgggaagacatgacctagatgggagttgcccacacgactacggacctcaatacgatccatatggtgagaatggtcttccttgtagttggctacctctggactaatgggacgagagaaacttggccaaccacaggctgaatcaaacttgtccttggacgaaaagagtggctcaccagtcgccacatcaacataaatcccaggctcaaactgattccaaagcggactcgtaaaggcccgttctgttccattctcctgagtcacagcgtaggcttctggactcaaactttccttaagctcctcccgattcggcttgtgataagcactagcatcaataacaggactagctgcctgattgacattgatatgacagtagccattaggatttttcttgagataatcttgatgataatcctcagcaggaataaagtgttggaggggcaacaattcaaccgccaaaggctgaccgtattgctcagtcatttcttggaaaacttgctcgatagtcgataaatcatttgcatccgtgtagtaaacacccgtacggtactgagtccccacatcattgccctgtttgtttttactaagaggattgatgatacggaagaaatgtagcagaatctcacgcaaggacaccttgctagcatcataggtcacctgaacggtttcagcgtggcccgtctgaccgataagctcatagcgagttgtctcactacggccattggcataacccgaaaccgcatcaagcacaccaggtacgcgagaaaaatactcctcaacaccccagaaacagccaccagcaagatagatagtatgattattagaatctgacatctgtaaaactcctttcactagaacgttttatatccacgccttaagtgtaacgcttttgagaagatttcgcacttatagtgacttgagggagaaaaaatcccatcacaatgtgataggattttatgtttattccatttcaaagctttcgctcttaatcttatctggtaagactagagacaagaggatacacaagatcgctggaatcaaccatggcaaggatgctcctgacaatggtaggaagttaatgagggcatttagtcctgcaagcttgaactggctaccaagaacgctgagcaaggcaattagagtgaccacagcaactgtgagctgcatacctggtttagacaaggccacgaacttgttggcaattacaatcatgacaatcgtgatcgtgattgggtagagaatcaaaagcactggcactgagaaagcaatgatattgttaagtcccaagttggcaatcgcaaacccaatcaaggtaaagagaatagcgtaagccttgtaggatactttcggaaatgccttgtggaagaattccccagtcgcaacgataagtcctgcggttgttgtgaaacaagtcactgtcaccatgatagctaggaaaatttgagccgctggtccaaagatagcttgtgtggcttgtgacaagacgctagcaccaatattggcatcttttggtaggcctgccacttggagtgggaaatgattgcccaaaaaggctaatcccaaatacagagcaccgaagaggatagtcactacgaaaccaacgacccaaatcgttgagatatactcttttttagacttgaagcctaattggttgagtgtgactactgctactacactgaaggccacagaagccaaggcatccaaagtgttgtagccttccaagaatcctttaccaaaagcagaagcctgataggcttgacttgcatcctgaggattgtgaccaccatatttaaatgctcctgccacgataacgataacaatcatgatggcaaagataggcgtcaatatacgtccaatactatctagaattttagatggattcaaggcaatccaaagtgctagagcaaagtagattacggtaaagacaaagagccaaaggctagtatgtccacttccaatcaaaggagagaagccaattgaaaaggcggtggcggccgttctaggaatggcaaagaaaggaccaatggacagataaagtactgccaaatagactagggcaaacttaggcgagattttttgagaaatctcatgaatgtaccccttaggatttaaagtcccgataaccagtgttaggatggcaataccaacacctgataggacaaagccggcaatggctggccaaaaatgacctccagattcaaagcctagctgagggggaaaggtcagatttcccgctccaaagaacataccaaacaacaataaagctgtaaggcctcctttttttaacataagtttctccgatctaagacaaacaagatatcatctcaaaaaagataacttgtttattactattttagtcaacttacttagtatgacatgattagtttggaacttcaagctattgaaacgtatttacaaaggtttttaaaattgcaaattttctgtatccttgtacaaaaaaactagacaagattctcatctcgcctagtttgatattttgattatgggtgactgacaatcagttcaaggtttcccttaatttgccatgcttcaacatcgctaggaagaataaagtggctgccttttgcaattgggtattcttgattatcaactaagaggcttccttgaccgtcaagtacactaaacaaactgtaatcagcagtcttttcaaaatcagccttacctgagatttcccatttataaacggcgaagaaatcacttgctactaagagcgttgatttgaggtcatctacttttgttgtgactggtcgactgttggctggctcaccgatattaaggacatcgatagatttttcaagatggagttcacgcaggttaccttgatcatctttacggtcaaaatcataaacacggtaggtcgtatcactagattgttgcgtttcaagaaccatgatacctgcaccaatagcatgcatggtaccacttggcacatagaagaaatcacctgctctaaccggaaccttagtcaaaagattttcccaatccttactttcaatttgctgacgcaattcttcttttgatttggcattatgaccataaatgatttcagcacctggtttagcatcaatgatataccaacactctgttttaccaagctctccttcatgctcaagtccgtaagcatcatctggatggacctgtacactaagccaatcattggcatccaaaatcttagtcaagagaggaaagacaggttcctgacgattaccgaacaactcacgatgctctgcataaagaacatccaaggtttgaccggcatagcgaccattcttaatagtagacacaccgttagggtgagcggaaatagcccagtactctcctacatggtcgcttggaatgtcgtagccaaagacatcacgcaaatgcgtgccaccccaaatcttctcctgcataacagattgtaaaaataatggttcagacataaaaactccttatataagaatgaatagactcaaaatctatgtcttaacatagatgattactcacatcatgataaatgaatcagttccactttaaagcggatgttccaaaaatcacctatagccagtaagctccatcatcagcaaatcacaaacagactttgacgagtaattacctcaattataagcataatttgtgaaaatatcaacagagtccttaaagaaatcataagattttggcttaatggctgcaagtcatttcaatagcaaatttcctttaagaatcctactcattccttcatttttcggatagattgattgaatttaaagactttttaacctataatgttagtgatattatgaaaggaaatctctcaatgaaattctattcctatgactatgtgctaagtcagattagccaacaaaactgggttatggttgccattactgcaggacttattttagtgaccggcgtatttacttttaaggccttcaaagaacgccatgatactaagtttcgtgaactctctattatttctattttaaccttagttgccgtggttctaattgctatcagtaatttccaaagcaatcaatcaaacaatgaccaatttagagcatctcttcactttatcgagattgtgtctaaaaatctcgacgttgataagagtaaagtttatgtcaatacttctactactacagatgatgctatcctcaaagttggaaacaaatactatcgtgccatctcaggttcagaacctgacagctacttgctagaacaaataaaactttacaagtctgatgttgaactcgtggaggttaaaaaatgacatctttttatcttgctgttgcaattaaactagctttggggcttatttcactcgtctttgttatcaatttaacaggtaaaggaaacctagcacctagctcagctgctgaccaagtacagaactttgttcttggtggaatcatcggtggtacaatttataatagtaccgtttccatccttcagtactttgttatcctgattatttggactattttgatcttacttcttaaatggctcatcaccaatattcgcttcatcaaacatttgattgacggtaaaccaactctcatcatcaaacagggtcaactagatcctgaagcttgtcgctctataggactttcagcttctgatgtcgctttaaaattacgttctcaaggaatttttcaactcaaagaggttaaacgtgcagttattgaacagaacggccaattgattgtggtccgttctggcgatgaaaatccaaaatatccaatcattactgatggggtcattcaaacagaaattcttgatactattggtaaaacggaagattggttaaatgaagagcttcaaaaattaggatatgaaaacgtttcggatatctttattgctgaatacgataaaggaaacattaatgtcgttacttattaaacaaatcacttgcattaccgtttaatattgtctacaatggtctcatcataaaaaggaggttctactatgggaatcgaagataaattgaatcaagctaaaggcgctcttaaagagggtgctggtaaactgactggcgacaaaaagactgaagtcgaaggtgctgttgaaaaagtggtagcaaaagcaaaagacggtatcgaagatgttaaagaaggcgttgaaggtgctgttgaaggccttaaaaatgctttttctaaaaaataataataaataaacagaagctcttttccttttttgaagagggcttctgtttttctttatgttcttaactagaattacttacgagaatgcttgcttccttttaaggcaaatgaggttgtcatcataactgctcctaatgcgcctagtcccaaactgctcacatcaccagtatttggtagacttgatttacttgtttgattgctttgtgaacttttagatgactgattagccttagaacttgtttgggtattttgtttctgagcaagattagtttgtacgactgagcttacattttccttttgactcacgcctacatgaccttttgatgcttcagaagtttgtttttgagtaagaatattatccaatttctcagcagtctcttgagcttgttgttgggcactgcttgtcgcattagtcattgtttgtgtcggttgctcttttgtaggctggttagcaagagaggtatttgatttaagagacgctccttcagagcttgaagaatttgatgttggcgtattttgatttgataaagctgtgtttgtcgctgtcattgctggagcattggtagctgaacttgtactacttgtgctagttgtattctcagaacttgtcgaagcagattggccccacggtgtgtttacgcttccggtattggtagagcttcccccatagctagtcggtccaccgtagcctccgaagttatcagacattgagctattgccaaagccaccgcctgggaagccgcccatgccaccagcaccaggaccattgtttgtgccttcttcagtagctgttgcagtcacactagcaccacttgatgtcgtaatggtataggtttcacccgaagttagactctcggtactaaagaccacatttccaaatgaagttgttgctgttgtggtcgctacaacatttccagaactatctgtaactgtgatggtatctccagcactaccagagatgttggccatgatataagactggcttgaacccgttgtaaaggcctgagccattccttggttacctatggcccaaacggtaccgccagaaataatacctgttccatcgtagtcgatagcagcattatctgcacttgtctgagcgacgtagagagaaccacttttcactgtcacattgccgttactgtcgataccatcaccgtctgccagaatagttaccgttgcaccgtcaatattgatgcccacttcattttccaagtcagaagtcgaattggttaagcttgaagtatcagcgctgtccttggtcgtccactcagtggcgttaataccatcatcaccagcagtgatatcaacggttccacctgtcaaattgatataacgcccttcaaggccttcgtcacctgctacaactgttactttagaattgccttcgacagtcaattcatctgtaaccgtgatacctttatcagttgcattaatggttaccgttgagtcggtaatcgtcaaatcaccactgttcacatctgtttcgtcttcgacctgaataccgtcatcagttgccgtgatgttgactgtggcatttttaatagttacagctgtcgtcgcattgataccatcctttgcctcagaagtcaaatcaagtgttacagagtcaaccgttacactgtcagccttgatggcgtgcttttcagtgcttgaaagggtcaagttacttccagtaccactggtaatggtcaaggctcccgctgcttcaatcgcattagcagacgtcgaagaaatagaactgtctgaaaggacattaacagtcaattctgctgaagaattggaagtaatagacgaatccgttaaggtcacaccatccaagtagattgtaactggatctgtcacgctacctgacacaataatggtatagcttgaaccatttccggtcaaagtgtatgatcctgcttgattgatggtaattgtcgttccatcaactgtgacagtaccgctatcacttgttaccacggttgttccattgaaagtaatcgttgtcgttgagctttctgaatcactatcttcagactcagttgtcgtcgtttcagtagctgaatctgaggcgctgttggttaacactgaagctgtttcagatgcagtggcttcagtggtgcttgagcttgtattagagctagtgttttcgtctgcattgttcgtttcagatgctgaggtttcactagttgtgctttcagcagtttcagaagaacttgcttctggagttgcggaagtacttgaatgatcagatgtttcactgcttgttgatgtagcagtcgtgtcctctgtcgtacttgttgtacttattgtacttgttgatgatgaatcggtgtctgaagttgaagccgcagttgaagtacttgtagccgattctgtgcttgtttcagtagtttctgatgtattgtcggtctgagtactttcttcaattaaatcagcagtggtttcacctgttgaaaccgttgagagtgttgattcagtgtttgtctcgtctgctgaaaccttgctgtcatttaagacaactgagctaccaaagattaagcttgctaccaggactgaacctgctgttttccattttgatgatttcttaatggcataacgttcttgtgtttgtttgctatgtttgtatgtcatatgttctacctcttacttacttttgagatgcctctattaaacacaagaaacctaagacaagacttaaagaaaggttaatctttccttaaagtaaaaaaagtccccaagatattgggaactttcaatctctaggatagactactctaaattcttctaaaacaactagactgtcctgactaaaatgtaatccaacctcttccaaccaattgctaaagagattctcatgaatctcttgccaataggttagcccacggtctccttcaccttccttgtaggcatggttttcagaaacctctttaaatgggatgacctcaactttcgtcgtttcaataatgcaaatagcattctccttactatcaagaatgacgctcagttcattttccttgggcaatggttcattccccactgcatacaagtcaaaagctgaactggttgctgtcttttgccccatcaatacgagctctgccaaataatctgcttccacgccaaaggcccaggcatcaatcttatctccgattgtctgatttaaaatcttataggcttgccacatctggtctgatttcatcaatctactcctgcttttactttccttccattataccaaaaaatgataggccagatggcactatcattttcatcttaatacttagaatgtttgtaaccgtaaaaggcatagataactgaaccgattagcactgccaaaccaaaggctaaccatgtctgccaactgtactgactcataaaggagagacagacgataattgagataattggtaagaccggaacaaatggaaccttgaactcgtccttctgtggcaagcccttgtccttacgaagaataatgagagcaatagccaagagaactaagtaagccaaggtcgcaatgttaaccaaggatgccatgttggccaaggagaaaattcctgctgagatagctgacaatacgcctgtcaaaagtgtcgcatgatgtggaaccttattagtctttgaaaccttttggaaggtttggggaaggaaaccatcacgcgccaggctataaaccatacggctaagggcataggccattgaaatacataccgtaatcaaggtcataatagcaacgacagagacgtagttggctgcccaagaaatcccgatatagcgaagggcataagccacggcatcatcaacattcaacttggtatagtgaaccactcctgtcaagaccagcgaaaccactgcatagagtgaagccacaataatcaaggcaagaacgatacctcgaggaacgttcttttgcggctctttaatctcgtctacggtcatagagatagactcgaaaccaaggaatccaaagaacatgagagaggcaccagccataatcccagtttttcctccataaatctgaccaaacccaaatggtgcaaaatctgcccagttgctaggattcaaatggaagaggcccactaagataaagacagccaaggctgaaaacttgagcactaccaagagggagttcaaacgtaaagcctgtttagaattcatgagaagaagagccgtcaccaagaccaagaccaagactggcaagaggtcaatgtaagtgccttgactgggattgaaaggtccactgatggcttgaggcaacttaagaccaaaactagccagtagccccttgaggtaggcaccccaaccagaggccacactggatacagcattcataaagacaatcatggtcaaccagccacccatccaagcaggatactccccccagacagcatagagataaccataaacaccaccagccgatgggtaacgtgaggcaaactcggcaaagaaaatagctgacatcccaacacacacggctgaaatcaagaccgaaataatcagggcaggaccagctagagtcgatgccgcggtaccagtaatcgtaaagattcctgtcccaaccatggcaccgattcccagaaggactacatccctaagggtcagatgtcgtttcatctcagtctgagcgagaccgacgtcctttttacgaaaaatactcatttttatactccattttttgcgaaataccggactattataccatatttcttggcctaaaagggcccatttctgtatttttatacttttattgttgaatgctatgccaaaaatggggactcccagtggttgctttttaattttacatacatctcgattaaaaggagcttgctaaagtggtcctatatcattctatttcgtttctcaaatccttatctggaaagaattttcaatttttagaaaaaacatgaaaatcttatgaatgcgtttgattcttctaataaaagatgttagaatggggtcattaaaaaggaaaaggggaacttttatggaaaataaagttcattttaaacttcataaagtgaaaaaacaatgggttaccattgccgtgtctggtttggcacttggtgcctcattgattggagttggtgtctctgccgacgagcaagctgccaatcaagttacctcagctagcacgcctgaaagcgtcagtcaggatcctgagcttgttgtcacagaaacaactgtagctacgacaaaagctaatcaaggcgcaaccaataaggcaactgatacaactgctactgtcacaactgataagcagccagtccttaaggaagaccaagcaagtagcacttacaatttgtctagtggcgaaacgagaaccgctacctcaacttcagaaacagctagcacagtcaccgaagtaaacagtcaagcaccggagtctgttgaaactactgtcgtttctggcggtcaattcaagagcgatgctgagggcaactggtactatctcaaagatgggaaaaatctgacaggtgcccaaaacgttgaccatttcgacctttattttcacgaggatggcaagcaagccaagggtgagattatcacagaaaatggacaatcttactactatgacaaagccaatggacgtaaggtaaccaatacctctatcaacattgatggtcaagcctacaaagctgatgcccaaggtcgtttgacagcagttctgcctgaaacgaacaaacgcaaccagtttattgaagacaacaaccaaaactggtattacctcggcaaagatggcaaacccgtcactggtgctcagaacatcgatggctttaacctctacttccacgaagatggtcgacaagctaaaaacgaaatcgtcactattaatggtgatagctactatttcgataaagacaatggacgtcgcgtaacaggtctccaagctcttaacaacgtcaaccataaatactttggcttttactacttcgacaaagatggcaagatggtcaaagatgacttcatcactgaaaatggaaatctttactactttgatgctactggtaatcaacctaattttgtctttgtttcggataaagctggaaactggtattacatcaatgacttcaaggcaactaaaggcttctcagacccatttggtttccaaaccgaattcctagaccgtagccaagctcactacaagacaagcgttcaaaacctgaacggacaacagtattactttgatcctaagactggtattatggtaaccaatcgctatgtttctgacgacaagggtaattggtattactttggtaaagatggtaaggcgcttcacggttttcaaacggttgacggtagccttcactacttcaatgacaatggtcaacaagtcaaaggggacttcctttactacggtaacgatatctactatttcgataaagataatggaaatccagtaactaaccaatttatcaatagagacaactcttggtactacttcggagctgatggtaaagccgtgtctggtttccaaaccattaacggacagaacctttatttccacgaatatggtgtacaagccaagggacaactggttactgttggtggcaaaacctactacttcgacccaaatacaggtgacaagtgggtacatcgctcacttaccttaaacggtacggtctataactttgatagcaatggtgtggcgactactaaagctgaccaaaccacaaatcgaaatcaatttgttaaaggtactgatcaagaatggtactactacgatgccaatggtaaaaaggtcactggtttccaaactattaacaaggacctcttctacttcaacgataagggccaacaagtccgaggaaagattttcaacctaggtgataaccactacttcgccaacaaagacaccggtgctgtcctacgtaatgccttctaccatgataaatctactgggcgttacggtgacttctctgaaaacatctactacgctggcaatgatggtgccttcaagacaggctggtttgaagttgatggcaaccgttattatggtagcgactattctgatgacgacacacctaaaggaaacctctacacaggagttatcaactctcaactctttagcccagatggaaaactcttgacaaacggtctctatcctgagttcaagcgtactggtgagaattcgtatgaacttgaaggtgtctatgttacagatgccgacggtaatatcaaagaaggtccttatcaatatgatggtaagattcttggatctaaatatagtaacgtccgccaatcacaatggtcaacttttgacgaatgggatattcttaatggacacctctaccatttcgactcaacacctatgaccttcacagcaccaaatggccaaaaagtgaccacaaacgttgccattgcaacaactaacaaggcccttacttatcgtggcgtaacctttaattttgatgccaagggtattgatgcggcaaaagaaaaagccatccactttgaccaattgcagacggatcgtagcggtacaagttatctctatgaaaatggtcaaaaagtcactggcttgaagacatttgatggcgtcacttactatttctatgaagatggccgtcaagccaaaggcacagaggttacaatcaacggtaagacttaccaatttgaccaattgactggtatcatgacacgcaacgccttttcaaaatcatacaactacgaaggttctccacgcttcccatactacccaacacgctactatggtaacgatggagctgctcttactggttggcaaaccatcgatggcaaagactactacttccgagctagtggaaacctcgaaacaggacgttttgtcatcggagacagagcctataatgctgatgacaatggtgtagttgctgaccgcaagggtgagcctgcttatcgcaatcgcattgtctacgataaaggtgacaactactattacaatgacaaaggtgaaaaagtgaccggcttccaagaagttgatggcaaggtcctctacttcgacgctgaaggcaaacaagtcaaaggacgctttgtcacagttgataactacacctactatttggaccctaaaacaggagaaaaatacactaaccgctctgtcctcatcgacggtaaactctataccttcgacaaagaaggacatgtcgtgtcataagatgagatgaaaccgagacgaaagtcttggtttttttgtggggaatgctaaaagctatactgtaaaagtacaattcttatgtctttatttttgctataatagtctcaactaaaccaaaggaggtttcctatgacaaccttatacgattttacagtttcaaatcaatccaaccagcttgtgtctctccaggactataagggcaaggtcgtcttaatcgtcaatacagcaacaggctgtggtttgacgccacagtatcagggcttgcaagaactttatgacaaatacaaaaaccagggtttcgagattcttgattttccttgtaatcaatttatggggcaggcacctggtagtgctgaagaaatcaataccttctgcaccctaaattaccatactaccttccctcggtttgccaaaatcaaggtcaatggaaaggaagcagaaccactttttgattggctaaaacaagaaaaatctggacctcttggggctagaatcgaatggaactttgctaagtttttgattaaccgtgaaggtcaagtcgtcgaacgcttttcttccaaaactgaaccactaaaaatggaagatgctatcaaggctcttcttagtaactaaaaacaaaaaacgagagtgaaactagaacgacaatctttaactgtcgctagttctgctctcgttttctgcgttaagaaaaatagtatagaaagaaatttcgctttattttagaacaaagctgtcaatgctgtaattaaaccaaagataatacctggtgcattggccgcagcaaggggaaggtcacgttcttttttaaagagaccatagtaaacccaaaggctacagttgactgcagctaccaatggttggataaagtttcctttatgaccagacaaattgtccatgatttgtggtacgtatgatacatacatcataactgacatgaaggttgccacccaaccaagggttttcatttgtttatctgacattcgagactcctctttcataaaattctatttgccttgtacacctagaaatatttcaagacatgttttaatgcacaaaattaaaacagtgtctatcttacgctttaacaatagagaatgcaagaatttcgggacaatgttaagaagatgtaaactatcacaagattgtgatagtgcatttagtctcttatgtagcgttttcatcagagaaaaagacctctttaagaggtctaaagtcaatgaatctactattttttctcatcaaaaagcactgatattaaggattactgtcataaatcattcagctaagagcacttctttgatggtttgtttttggagttttctgttggatagataaaagaggctttcataaactacagcaaaaccgagcaaggtccagaagcacacattcccatcaaagttatgctcaatcttttcaggaaccgtgtctttgatcacaccgatcaagatttccatgatgccatattgataagctgtcccaagaacaaatcctagataagcccaaaaacgatagggagcgagaatatgattttggcattcacgattggtgtagccaaaagccttcatcaaggctaaggtttcgcgactttctgagacgacaatccccaatgacaaaaagagaatcgagaaagaaagaattaggccaatcataatcatcatggtttggatgatgtcatctgtgtaatctcttaagccaaaggacaattgaaccatggccgcaaaacacatagagccaaagactacaaaaaacaagatagattttctcccccaaatcagtgacgaggatagctcttttaggaaggatttgtctttcttgggagccctctttctcctttggaccttgattggtgttggagactttttcaataagcgaagtgccggtgtttgtagttgtcttctggcataaccaatcgcgagaagcataaagaaggtcgttggcaggatcaccaaagcaagcaagagctgccagtgaaaatgaatggtgatttctggcaaaatccccttctcattacggaagtcaaaaaaatgtcccatcatgagaaatgaagcaaaatagccaagaagcgctccagctccaaaactgagtccaaaggcccaaaatcgtttagccaactggccattgctatagcccaaagcctttaaaattcctaattgttccttgtggtcgtcgacaaattgtttgatataaaaacacatgagaaggaccgacgtcaaggacaagacgactccactgaccatggccaccatccaggaaagcgaaacctgggcatcatagtaggtctgaatcatcggattgattttagaaatctccaactgctcgatatcaagataaaaattcaagaaaagattagccacaaagaccgcacaagccccaatgatactgacgacaactaattttcgaatatcttttactgaaaacatggcttaccatccaatctcataggcagtctgaggctgatcattggtcacaacttgggtaatcttgccactattgacacgaatgatggttctggccatatccgcaatattttggttgtgcgtcaccatgattaaggtaaagcccaacttttcctttaatttccagatatagtcgagaatcttgcgccctgtttcttcatccagggccccagtcggctcatctaagaaaagaatctctggctttttggctaaggcccgagcaatggagactctctgctgttctccaccagacaattcacttggatacttgtccagcttatcgccaagacccaaatcctcgatgatcttcaaaaaatcatgattgcttgccagatcagctcccatcttaacattctgtctgaccgtgagattcggtaataaataatactgctgaaaaataaaggcaatcttctcacgtctgaaagctgtcaattgagcatccgtgagttgagacaaatcctgcccttgaatgaggatatgcccctcgtctaccttttctaatcctgataatacgtttaagagagtggactttcctgatccagaagggcctaggataaccacatcatcctggtcttgaatctgcaaatcaatcccttttaaaacctttgtttggccataacttttgtgaacattttctagttgaatcatttctttcctaccatttctttgatgagagattgacaaacttctgtcaataaaccaatcacttcttccatgctgaacagataaataccagaagcaaccatcgaggccatcccgtgtgagtagataaataaatgctggtacaagcgactagcctcctctaacgtcaacggatagtctgcgacaatcgattccagaaccaattggtagctatgatccttcatgggaagaaaatcttgaaagcgacgaatcgaatctttgctaggattttggaaaagcaattgaaagagttggggctcttttgaggcgaaaaggatataagcaaccccgacggatcgaaaaggcttctcatcttctaaggctttacgaacatactccaccacgaccatttccgcagcaccaataacctctgcttgtaactcagccatattggcaaattgcccaaaaatgactctcggtgtggctcccagttgctccgctaatgctcgagcagttaaactagccattccctcttctctcaccaattgtaaagctgtcccaatgatagcctctttactaaatttaaccttgggtggcataagactcctttcacgcaacggttgttgcgcaacagttgtttcctaaaatagtaccataataaagaaatacttgtcaaaaaagatctgtaaagcataaaacaaaaaaaccagcccactgatacaagtgaagtctggtctactaacaactattctaaggcaaatcattacctgcagcaaggtagatttggtaccattccttgcgcgttagggtaacttctgctgcttttcctgcttcaaggacatgctggggcttggtcgttccgatgacggcctgcatcttacctggatagcggagaacccaagcaagggcaatagctgtcggagtgacttggtatttttttgccaagtcattgaggacgtgattgagggccgcaaactcttctttaccgacaaaatttcccttgaaatagccatgctggaggacagaccaggcctgaatcaccgtatcagttaaacgacaatactcaaagacactgccatctcgcacggctgcttttgggccttccatattgacatgaaaaccagcttcaaagctcggtgtaaaggcggcactcaactgcagctggttgaccttgagaggttgtttgacagccgttttgagcaattccatcatcataggattttgattggacaccccaaaatgacggaccttgccagcttgctccaagtgattaaaggcttctgccacttcttcaggctccatgagggcatccggtcggtgaaggagaagactatctaaacgctcaatctgcagacgctcgaggatgccatcaacggaatccaaaatataatctttggaaaaatcaaaataggtaaaaccatctttgcgaatcccacacttggactggatccacatctggtcccgaagatccggacgacgtttgaggaccttaccaaggagctgctcacactggccattgccataaatatccgccaaatcaaaggtgttgattccaatcgacagggctccctccaccaagccctccacctcatcttcactcaattcgctaatacgcatcatcccaaggacaatcgttgacaatcgctcattttcagcaaaatcaatatacttcatctctgcctccttttctgtatctctattgtagtgaaaagggtttcaaaaatcaattgagaaataaaaggccctcagcatcaactgagggcttggatgatttacgatagctaggtcacctttgatagtctctcagaatccctaagattcaagactgataacactcccattgattgtatataaagaaatggaagataagattttcaataaaaagagctctttatcacttccaaaagcttttacagatttctaacatggatgatacatttattctttataataacgtttggtaatcttgtattgtgaaataaggatataaatatagatgatggatacaacactcaaagccaagaggatatccgtctggaaggcaatcccaatgattaaaattccaattagcatgataggtaagatataattacttaacttaaccaccacttcgaaattttcctcgtagcttatctgtttttctgcctcatccatcatactcatcataaattcacgcacttccttggtattgacattgcggggaattggttttccataaagcagatggaaggtcttgcgaaagaagatatctgataagaaaaataggacaatcaagacaagaaaaagatagagcatggtaaaagttccaaagataaaagctaagtgccctgtggaaggtctatccatatacacccattgactataaaagatgatgactaaaaagtatggcaagatcatgactcctttaaaaatggtcgctaacccaaacagttttttattctggatgtcatagtgataggcttcctcttcgtcttctatctggagcattttttgatggacttttctcgcgcttattagtaaggctatcgtgaccataaacacgataagaaacaaaagtattgagcccaaaaggagtacttctatactaaagaaggattggatttcaaggggtttttcggatccgaacatgcctgtcaaaaaaccaatgactcctccaatcaagccggaaactgtgatgattccgacatttctccaaaaacgattacgtggagatcttttttgtggttgctttttcataatcattcctcttcctctacaagactaaaaacattttccacaggctctttaaaaacctgggcgatggtgatggcaataataaccgaaggggtatattccccccgttccaagagactgatggactgacgcgagacccctgctagcttagctagctcagattggttgagcccatcacgcgccctcaactctttcagacgattttttaagatcatggcatccgcctccttatagttgaacaccctgaatatcttcgatacggactaatttagtttctctttgttgtttattaatttcacgactcaatttgacccaatcttcatcgatatccataatttcatactcaaatccaacaccatctactgtaacagtggccgtttggcctttcaattcttctaaaagtctagacatttctttatttcctttcacttgtttttctaatcgtctgatacgtctgttcaatccttttatcttcttttctgagcttgcataaaatataactataaaagggataaaaagaatccatatggctcccataagaatacctctccttctttcgtctaaaactattgtaacgcttctttttatttttgacaagcatctttgtcaaaaataaaaaggatattgtcaaaatcattgaaaatatgatataaataacacaacttttctaacatcttatagcacttctccttcaaaaaaatgacttggaaaaattgatatgcaagatgccgttacgcaagcgcccgaaaccaaatagtttcagatactcggaaattgggaaaattgtcttagcccgagcctaaaaatttaaaatctagaaacttaaaacttagtcatgaaacctcgaaaaagattgctgacgtccggtgtcaccttagcaaaattcaagctataactttccttgggtattactatttttatgataaaaatagcataaaaatctagttatccgcataaaaactggacttatcacactttatcaaggtcaaaaccactcaatttactactaatttactacttatgaatgagctttgatacgacgatttatccttgaaaagtgaagatataaagatacttccaataaaatttgaatatttaataggtagacacttcaaaaaatgaggtgtctatttttttacccgattttgaaaggaagtgaacttatgaaaacaaaaaatcaagaatcaaaaggtcgttccccactctttaagaccatcaaacattcattcagccaataaaaaagaaaggataggtaaaaatatggaacttaaatttgtgattcccaacatggaaaaaacattcggcaatttagaatttgctggcgaggataaagtcgttcagcgaagaatcaacggacggctaactgtcttatcaagaagctataatctctattctgatgttcaaagagcagatgatattgtggtggtgcttcctgctgaagctggcgaaaaacatttcggctttgaggaacgtgtgaagttagtcaatccacgtattaccgcagagggctacaaaatcggcactcgtggttttacaaattaccttttacatgctgacgacatgataaaagaataaagaaagagaggaaaaatgatgagattagcaaatggcattgtattagataaagacacgacttttggagaattgaaattctctgctctacgtcgtgaagtgagaatccaaaatgaagacgggtcggtttcagatgaaatcaaggaacgtacctatgacttaaaatccaaaggacaaggacgcatgattcaagtaagtattcctgccagcgtgcctttgaaagagtttgattataacgcacgggtggaacttatcaatcccattgcggacaccgttgctactgccacctatcaaggagcagatgttgactggtatatcaaggcagacgatattgtgctgacaaaggattctagttcattcaaagctcaaccacaagcaaagaaagaaccgacacaagacaaatagtcgctaggtagaaaggagactttttcgcatgaaacagcgtggtaaaaggattcgcccatctggtaaagatttagtctttcattttacgatagcgtcactcctgcctgttttcctgctggttgtcggactgtttcatgtgaagacaatccagcagatcaactggcaggattttaacctatcacaagcagataagattgacattccctatttaattatcagtttcagtgtcgcaattcttatctgcttgctggtagcgtttgtattcaaacgggttcgctatgatacggttaaacaactttaccaccgtcaaaaactggcaaagatgatacttgaaaacaagtggtatgaatctgaacaggtcaaaacagagggtttctttaaagatagtgctggtcgtacaaaggaaaagataacctacttccctaaaatgtattatcgacttaaaaatggcttgatacagatacgggtggaaatcacgctgggaaaatatcaagaccaactcttacacttggaaaagaaattagagagtggcttgtactgtgagctgacggataaagagttaaaggattcctatgtggaatatactttgctctatgacaccatagccagtcgtatttctattgatgaagtagaagctaaagatggtaaacttcgcttaatgaaaaacgtatggtgggaatatgataagctccctcatatgttgattgctggtggtacaggtggcggtaaaacttactttatactgacactgattgaagccttgcttcatacagattcaaaactgtatattcttgacccgaaaaatgctgatcttgcggacttaggttctgtgatggcaaatgtctactatagaaaagaagacttgctttcttgcattgaaacattctatgaagaaatgatgaaacgtagtgaggaaatgaagcagatgaagaactataagactggcaaaaattatgcttacttaggtctcccggcacacttcttaatctttgatgaatacgtcgctttcatggaaatgctgggaacaaaagaaaacaccgcagttatgaataagctgaaacagattgtcatgttaggtcgtcaagctggcttctttctaatactggcttgtcaacgtccagacgcaaaatatttaggcgacggaatccgtgatcagtttaatttcagagtggctttaggtcgtatgtctgaaatgggctatggcatgatgtttggcagtgacgtacaaaaggatttcttcttaaagcgaatcaaaggtcgtggctatgttgatgtaggaacaagtgtcatatcagagttttatactccccttgtaccaaaaggatatgatttcttggaggaaattaaaaagttatccaacagcagacagtccacgcaggcgacgtgcgaagcggaagtcgcaggtgtggactgatcttgctggctggtgtggcaatagccacgccagcacttaaccccccgtatctaacaggggggtacaaatcgacaggaaacagtcaaaaaaacattagaaaatcctttggttacaagggatttacaaaatttcagcgtatgtcaaatgggctttaaaagttgacatacgcctttttgattggagggatttttactgaatgaacaaacttggttacagcatttaaaagaaaaacgcttggcttatggactatctcaaaaccgtttagctgttgcgactggtattacaaggcagtatctaagcgatattgaaacaggaaaagtcaagccatcagaggatttacagcagtccctttgggaagctctggaacgcttcaatcccgacgctccccttgaaatgctgtttgattatgtaagaattcgctttccgacaacagacgtacagcaggtggtcgaaaacatcttacaactgaaactgtcctattttcttcatgaggactatggtttctattcttattcagagcattatgctttaggcgacatattcgtcctttgctcccatgaactggacaaaggagttctggtggaattgaaaggtcgtgggtgcagacaatttgaaagctatcttctggcacaacaaagaagctggtatgagttctttatggacgttttggtggctggcggtgtgatgaaacgccttgaccttgccattaacgataagacagggattttaaatatccctgtactcactgaaaagtgccaacaggaagaatgtatctccgtcttccgcagttttaaaagctatcgcagtggcgaactggtacgcaaagaggaaaaggaatgtatgggaaacaccctctatatcggttcattacaaagtgaagtttatttctgtatctatgaaaaggactacgagcagtacaagaaaaatgatattcccattgaagacgcagaagtaaaaaaccgttttgagattcgattgaaaaatgagcgtgcctattatgcagtccgtgatttactcgtctatgacaatccagagcataccgcctttaaaattatcaatcggtatatccgttttgtagataaagacgattccaaacctcgttctgattggaaactgaatgaagaatgggcttggtttattgggaacaatcgtgaacgattaaaactaaccacaaaaccagagccttactccttccaaaggacgctgaactggctatctcatcaagttgccccgaccttaaaggttgcgattaaacttgatgaaatcaaccagacgcaggttgtaaaagacattctcgaccatgcgaaactgacagaccgacacaagcagattttgaagcaacagtcagtaaaagaacaggacgtgataacaacaaaaaaataactcaaatacaaattcattgaatatagagaggagaacatttttatgaattttggacaaaacctttataactggtttctatcaaacgctcaatcactggtgcttttagcaatcgttgtgattggcttgtatcttggcttcaagcgtgagtttagcaaactgattggctttttaattattgcgattattgcggttggcttagtcttcaacgctgctggagtaaaagacattttactagagctattcaatcgcattattggtgcttaaataaaaccgttcttttgtggaatataagtggttttcttatgttccgcaaaggaatggtacaccaaacgaagtgcggtagggatttttgaatctctacaaagaaaggacgtgaatatatggacgatatgcaagtctatattgcgaatttaggcaaatacaatgagggcgaattggtcggtgcgtggtttacctttcccattgactttgaggaagtcaaagagaaaatcggcttgaatgatgaatatgaggaatacgccattcatgactacgagttaccctttacggttgacgaatacacttccattggcgaactcaatcgactatgggaaatggtatcggaattacccgaagaattacaatcggagctatctgctctgctcactcatttttcaagcattgaagaactaagcgaacatcaagaggatattatcattcattccgattgtgatgatatgtatgacgtggcacgctactacattgaagaaacgggtgctttaggcgaagtaccagctagtcttcaaaactatattgattatcaagcctatggtcgggatttagacctttcaggaacgtttatctcaaccaatcatgggatttttgaaatcgtctattaaatctgtcggtacattactactggcagattttctattttacggggtggctcaatcagctacccctattttttatgaaaggattgattacatgaagaaaatacgaagctataccagtatctggtctgtggaaaaggtactgtattctatcaatgattttagacttccgtttcccataacctttacgcaaatgacatggtttgtcgtgtcactctttgcagtgatgatacttggcaacttgccccctctttccatgatagagggagcatttctcaaatactttgggattcctgtggctttcacatggtttatgtctacaaaaacttttgatggtaaaaagccttatggatttttgaagtctgtcattgcttatgcactgcgaccaaagctgacctatgcaggaaaaaaagtaacgcttggcagaaaccagccacaagaagccattacagcagttaggagtgaattttatggcatatccaattaaatacattgaaaacaatctcgtctggaataaagacggggaatgttatgcttactatgagcttgttccttacaattactcatttctaagtccagaacagaaaatacaagtgcatgattctttcagacagcttatcgcacaaaatcgtgatggcaaaattcatgctttacaaatcagtacagaatccagcatacgttctgcacaagagcgttccaaaaatgaagtcactggcaagctcaaagcggttgcctatgacaaaatcgaccaacagacagacgctttaatatccatgattggcgaaaatcaagtgaactaccgtttctttatcggctttaagttgcttctcaacgatcaggagttttctatgaaaagtcttaccgttgaagcaaaaaatgctttgtctgattttgtctatgatgtgaaccataagctgatgggcgattttgttagtatgagtaatgatgaaatcctgcgttttcagaagatggaaaagctcttagaaaataaaatctctcgtcgtttcaaaatccgcaggttagataaggacgacttcggctatctgattgaacacctttacggacagacaggcactgcctatgaagagtatgagtaccatctatcaaagaaaaagctggataatgaaacgctgattaaatactatgacttgattaagcctactcgctgtttggtggaagaaaaacagcgatatttgaaaatccagcaggaagatgaaaccgtctatgtagcttactttaccattaacagcattgtcggagaactggacttcccgtcctctgaaatcttctactaccagcaacagcaatttacattcccgattgatacgtcaatgaatgtggaaattgtagcgaatcgtaaagccctatctactgtccgcaataaaaagaaagaactgaaagacttggataaccacgcttggcaaagtgataatgaaaccagctccaatgtggcggaagctctggaaagtgtgaatgagctggaaaccaatttagaccaaagcaaggaatctatgtacaagctgtcttatgtggtaagggtatcagcaaatgatcttgacgaactcaaacgtcgttgtaatgaagtgaaagatttttatgacgatttaagcgtaaaactggtacaaccatttggggatatgctcggcttacatgaagaatttttacctgccagcaagcgttatatgaatgattatattcaatacgtgacctctgatttcctcgctggtttaggttttggtgctactcaaatgctgggggaaaatgaggggatttatgttggctacagcttagatactggacgcaatgtctatctgaaacctgctcttgccagtcaaggggttaagggttcagtaaccaatgcgttagcgtcggcttttgttggttcgctgggtggtggtaaatcctttgcgaataaccttatcgtctattatgcggtgctttatggggcacaagcagtgattgtagacccaaaagcagaacgtggcagatggaaagaaaccttgccagagatttcccatgaaatcaatatcgtcactctgacttctgatgagaaaaacaaaggcttacttgacccttatgtgattatgaaaaatcccaaagattctgaatcactggctattgatattctgacattccttacggggatttcctctcgtgatggggaacgcttcccaatccttagaaaagccattcgtgcagtaaccaatagtgaagtacgagggttgatgaaagtgattgaggaattacgggttgagaatacgccactaagtaccagtatagccgaccatatcgaaagttttacagactatgactttgcacatttattattcagtaatggttatgtggagcagtctatcagcttagaaaaacaactgaacattatacaggttgcggacttggtacttcccgacaaggaaacttcctttgaggaatataccactatggagcttttatccgttgctatgctgattgtcattagtacctttgctttagactttatccatacagaccgaagcattttcaagattgtagatttagacgaagcatggagctttttacaggtagcacaaggaaaaacactatctatgaagctggttcgggctggtcgtgctatgaacgctggggtatatttcgtgacccaaaatacagacgacctcttagatgaaaaactgaaaaataacctcggcttaaaatttgcatttcgttccactgaccttaacgagattaaaaagaccttagccttttttggtgtagacccagaggacgaaaacaatcagaagcgattgcgtgatttggaaaacgggcaatgccttatcagtgatttatatggtcgtgtcggtgtgatacagttccaccctgtatttgaagaactgctccatgcctttgataccagaccacctgtgcgaaaagaggtgtaaatgtgaaaccatcaatagtaaacagaataaaatcaaactggacgctgaaacgtctaggtaaagtggcaatgacagtggctttcacacttgtgattgccatttttcttttagccatgctgggaacggtggttcaagctgcgggcttggtagatgatacggtcaatgtggcaaatgaatacagccgatacccacttgaaaactatcaactggatttttatgtggataatagctggggctggcttccgtggaactggtcggacgggattggaaaacaggtcatgtatggactatatgccattaccaattttatttggacaatcagtttgtatgtttccaatgcgacaggttacttagtacaggaagcctattccttagacttcatttccgctacagcagattccattggtaagaatatgcagaccttagctggtgtgagtgcaaacggattttcaacagagggtttctatgttggattcctcttactcttgattttggttcttggggtttatgttgcctatacgggactgataaagagagaaaccacaaaggcaattcatgccattatgaattttgtgctggtgtttatcctatcggcttcctttattgcctacgctcccgactacattaaaaaaatcaatgacttttcatcagacatcagtaatgccagtttatcacttggcacgaagattgtcatgccccattccgatagtcaaggcaaggacagcgtggacttaatcagagatagcctgttttccatacaggttcagcaaccgtggctactgcttcaatacaacagttcagacattgaaagtatcggtattgaccgtgtggaaagcctgctctccaccagcccagattccaacaatggcgaagacagagaaaaaattgttgcggaagaaattgaagacagaagcaataccaatctaaccattacaaagaccattaaccgtttaggtacagtcttcttcctatttgtcttcaatattgggatttccatatttgtattcctattaacaggaatcatgattttctcgcaggtactttttatcatctatgctatgtttctgcctgtgagctttattttaagcatgattccatcatttgatggtatgtcaaaacgagccataacaaagctctttaataccattttgacacgagctggaatcacattgattattacgacagcatttagtatttcaaccatgctctataccttatcggctggttatccgttctttttgattgcttttctacagattgtgacctttgcaggaatctacttcaagctgggcgatttaatgagtatgttttctctacagagtaacgattctcaaagtgtgggaagtcgtgtgatgagaaaacctcgtatgcttatgcacgctcacatgcaccgtctacagcggaaacttggacgttccatgactactctaggggctgggtctgccattgttacaggtaaaaaaggacagtcgggttcggggagttctgcaaggacacaagcagatcactcccgaccagacggaaaggaaaaatcaacacttggaaaacgtatcggtcaaaccatcggtacagtagctgataccaaagacagaatggtagacactgctagtggtttgaaagaacaggttaaagatttgccgaccaatgcaagatatgcagtatatcaaggaaaatccaaagtaaaagagaatgtccgtgatttaaccagtagtatttctcaaaccaaagcggacagagccagtggacgcaaggaacagcaggaacaaaggcgaaaaaccattgcgaagcgtcgctctgaaatggaacaggtcaaacagaaaaaacagcctgcttcttctgttcatgaaagaccgactacaagacaagaacaatatcatgatgaacagacctcaaaacagtctaatattcagacttcatataaggaatctcaacaagccaaacaagagcgtccagcagttaagtccgatttttcaagtccaaaagtggaacgccaaggcaataccgttcaagaaaaaaccgttcaaaagccagcaacttcaaccactacagcagatagaacttcacaacgtccaatcacaaaagaacgtccgtctactgttcaaagagtaccactacaaaatacaagaagtagaccaccaatcaaaaccgccaccattaagaaagtcggtaagaaaccatgaagttgaaaactttagtgattggtggttctggattattcttgatggtcttctcactgcttctgtttgttgccattttattttcagatgaacaggacagcggaatttccaatattcattatggaggtgtgaatgtttccgcagaagtgctggctcataagcctatggtagaaaaatatgccaaagaatatggcgttgaagaatatgtcaacatacttcttgcgattatacaggtggaatcgggcggtactgcggaagatgttatgcagtcctcggaatccctcggtcttccacctaattcattgagtacagaagaatccattaagcaaggtgtgaagtatttcagtgaattattagccagtagcgaaaggctcagtgtagatttagaatcggttatccagtcctacaattatggtggtggtttcttagggtatgtggctaatcgtggaaataaatatacctttgaactggctcaaagtttctcaaaagagtattcaggtggcgaaaaagtgtcttaccccaatcccatagccatacctatcaatgggggctggcgatacaactatggcaatatgttttatgtgcaactggtaacgcagtatcttgtcacaacagagtttgatgatgatacggtacaagccatcatggacgaagcactgaaatatgagggctggcgatacgtttacggtggagcttccccgactacttcttttgattgtagcggactgacacaatggacgtatggaaaagctggaattaacttaccacgaaccgcacaacagcaatatgatgtgacccagcatatcccactatcggaagcacaagctggcgatttggttttctttcattctacctataacgctggctcttatattactcatgttgggatataccttggcaataaccgtatgtttcatgcaggcgacccaatcggttatgccgacttaacaagcccctactggcaacagcatttagtgggagcaggacgaatcaaacaatgagaaaggaagatttaatgatgaaatttagaaaaaatcagaataaagaaaaacagataccaaaggaaaagaaacctcgtgtctataaggtcaatcctcataaaaaggttgtgattgccttgtgggtacttttagggcttagtttcagctttgcgatattcaagcactttacagctatagatactcatactattcacgaaacaactatcatagaaaaggaatacgttgatactcatcatgtagaaaattttgtagagaactttgcgaaagtctactattcatgggagcaatccgataagtccattgataatcgaatggaaagtctaaaaggctatctgacagatgaacttcaagctctcaatgttgatacagtacgcaaagatattcctgtatcgtcttctgtaagaggatttcagatatggacggtagagccaactggcgacaatgagtttaatgtaacctacagtgtagaccagctcattacagagggagaaaatacaaagaccgtccactctgcttatatagtgagtgtctatgtagatggttctggaaatatggtactggttaagaatccgaccattaccaacatacctaagaaatcaagttataaaccaaaagccattgaaagtgaggggacggttgattccattacaaccaatgaaatcaatgagtttttaacgacgttcttcaagctctatcctacagcgacagccagtgaactttcctactatgtgaatgacgggatattaaaaccaatcggaaaagagtacatctttcaagaactggtaaatcctattcacaatcgtaaggataatcaagtcacggtatcgctgacagtggagtatatcgaccagcagaccaaagcaacgcaggtatctcaatttgatttggtacttgaaaagaacgggagtaattggaagattgtaaaataacaaatattggtacatgattacagatactttgtaatcatgtactctttttgataaaaaattggagattcctttacaaatatgctcttacgtgctattatttaagtgactatttaaaaggagttaataaatatgcggcaaggtattcttaaataaactgtcaatttgatagcgggaacaaataattagatgtccttttttaggagggcttagttttttgtacccagtttaagaatacctttatcatgtgattctaaagtatccagagaatatctgtatgctttgtatacctatggttatgcataaaaatcccagtgataaaagtatttatcactgggatttttatgcccttttgggtttttgaatggaggaaaatcacatgaaaattattaatattggagttttagctcatgttgatgcaggaaaaactaccttaacagaaagcttattatataacagtggagcgattacagaattaggaagcgtggacaaaggtacaacgaggacggataatacgcttttagaacgtcagagaggaattacaattcagacaggaataacctcttttcagtgggaaaatacgaaggtgaacatcatagacacgccaggacatatggatttcttagcagaagtatatcgttcattatcagttttagatggggcaattctactgatttctgcaaaagatggcgtacaagcacaaactcgtatattatttcatgcacttaggaaaatggggattcccacaatcttttttatcaataagattgaccaaaatggaattgatttatcaacggtttatcaggatattaaagagaaactttctgccgaaattgtaatcaaacagaaggtagaactgtatcctaatatgtgtgtgacgaactttaccgaatctgaacaatgggatacggtaatagagggaaacgatgaccttttagagaaatatatgtccggtaaatcattagaagcattggaactcgaacaagaggaaagcataagatttcataattgttccctgttccctgtttatcacggaagtgcaaaaaacaatatagggattgataaccttatagaagtgattacgaataaattttattcatcaacacatcgaggtccgtctgaactttgcggaaatgttttcaaaattgaatatacaaaaaaaagacaacgtcttgcatatatacgcctttatagtggagtactacatttacgagattcggttagagtatcagaaaaagaaaaaataaaagttacagaaatgtatacttcaataaatggtgaattatgtaagattgatagagcttattctggagaaattgttattttgcaaaatgagtttttgaagttaaatagtgttcttggagatacaaaactattgccacagagaaaaaagattgaaaatccgcaccctctactacaaacaactgttgaaccgagtaaacctgaacagagagaaatgttgcttgatgcccttttggaaatctcagatagtgatccgcttctacgatattacgtggattctacgacacatgaaattatactttctttcttagggaaagtacaaatggaagtgattagtgcactgttgcaagaaaagtatcatgtggagatagaactaaaagagcctacagtcatttatatggagagaccgttaaaaaatgcagaatataccattcacatcgaagtgccgccaaatcctttctgggcttccattggtttatctgtatcaccgcttccgttgggaagtggaatgcagtatgagagctcggtttctcttggatacttaaatcaatcatttcaaaatgcagttatggaagggatacgctatggttgcgaacaaggattatatggttggaatgtgacggattgtaaaatctgttttaagtatggcttatactatagccctgttagtaccccagcagattttcggatgcttgctcctattgtattggaacaagtcttaaaaaaagctggaacagaattgttagagccatatcttagttttaaaatttatgcgccacaggaatatctttcacgagcatacaacgatgctcctaaatattgtgcgaacatcgtagacactcaattgaaaaataatgaggtcattcttagtggagaaatccctgctcggtgtattcaagaatatcgtagtgatttaactttctttacaaatggacgtagtgtttgtttaacagagttaaaagggtaccatgttactaccggtgaacctgtttgccagccccgtcgtccaaatagtcggatagataaagtacgatatatgttcaataaaataacttagtgtattttatgttgttatataaatatggtttcttgttaaataagatgaaatattttttaataaagatttgaattaaagtgtaaaggaggagatagttattataaactacaagtggatattgtgtgctgagagctttcttctatactaatagacgaaagggtgtgaaaatgatttttaaatgatactgtggaacggaacagtagccctagtattgactactgtcgtttctattcatattggctattctaggactgagatgaaaaaatctataaatgctcagaataaaattgaacccgcaaatctccccaaaacaatggtgagtcatgtacttgtattattccgaaaaaatacacctctggtgcagtgagacaaattggtgtatcttatagtggcttcgtagatgaaagctatactctactatcactctttgatgatgtagaacaaattgaaaaagataatagacttcagacagctattgatgttgtcagagaacagtttggttttttagccatacaaaaaggaaccgtcctaactgaaggttccagaaatattgaacgcagtaaacttatcggtggtcattccgcgggtggattggagggattaaaatgaaacaagaaaaaaatacagtacaattttcagaaatccgtagcaaaggatgtaatgatattgaaatgcttgaaagatttttacatggaatcgttgaaacagcaacttcaaaacttcgtcagagaaaactcaaaacaactgaaatatcgatacgactagtacatgctaaatctgaaaaccgattaccattggaatttacatttagcattaagccaacaagctcatctgtgataatctatactgaggtaatcaatcgctttaaagaatgttacacaggtgggggaattcaaggttttacgattcaatttgataaaaatacccttgcctctgcatagaaaggatttgatatgattgaccgttcatatttaccatttcaatcagcaagagagtaccaggatacaaagatgcaaaaatggatgggctttttcctatctgaacatgcatcagcactctctgatgatacaaacaaagtaacgtacatgtctgacttatcactagagaagaaattattactcctcagtcaagtatacgccgggcagctacgcacacgcattcaagtgattgaaaaaaacaagcgtgtttcctacactggaacaataccaagtctgaccaaagatttcattttgataaaaactacaacaggtcacatcaatttgaaattaaaagacattattagtattgaacttgtcgaggaggtgctctatgaatcagcttgagtttcagcgtaatcacctacaaatggactattatagcgagagctaccaagattttgaacgtgacttctaccgctactctaacatgaatattccattgaccttcctaactgatgatatcctaaaaacaatggcgacttcacgtaagaattactttgtcctcaataaggaaaagtccagagataaccgcgatcacttcttcatatttgaagtaagtaccgtagatgagaatccgctaatctatcattatacatataagaaaactacaatatatttagcagaaaaataggagcagttcaattgactgttcctatttttaatattcataaaatctaaagtctttatactctttaacaatggagtcgccaaccagaacagactatactgaccagcgactaccttaaatttaatgtttcagatttattttcttatctctaatttcataaactacatctgctacattttcgagtaatcgtttatcgtgggtgataaacacgatagttccggtgtactccttcattagtatttccaaagcctctaaacttggtatgtcaaggaagttactgggttcatccattattaggatgttatatctacccatgagcattttagcaagcaacaattttataatttctccaccgcttaaaacagataaactttttccaatatcgttctgtttgaaccccatagatgctagcactgaacgaatttctgatatattgtagtcacaatccttctgcataaactccataacattctgattactgttgtacttgtaaccattctgtgcaaagtaacctatttttgccttaggcgaaatagaaattccttcttcatggtttaagatcatttggattaaagttgtttttccgattccattaccaccagttaacgccacttttgctcctaacggaatttgaaaagatgcattttcaaacagagccttatccccaaatactttattaatttctgcaccgactatagggtatggattatggagctccaatgctttactttgcctgaaacgaattctgcgaatgccttccggagcttctacttttcctaaggccgcaatcctgtgctctagggttttagcagcattatacatctttttttccttacttcctattgatttttgatgagctaaacgccctccgtcttcagtactttttttctttgaagaaccttttgccttctgttctattttacgagcctgttttcgcttttcctccgcagccctttccaatcgggcacgttccgcaataaattgttcgtattctgcagcttggctcttacgttcttcctctttctgacgaagataatcagaatagtttccccaatactcagtgattttgccatctttcagttcccatattttatctactatttcatcaagaaaatagcggtcatggctaataactaacagtgcacctgtaaaatattttagctgtcctattagaaaatcaattccttcacggtctaaatggctcgtaggttcatccgctaaaataccatgaacctgtgccgataaggcctgtgctattttaagccttgtttcttcaccaccgctcatagtctgtatatttaattgctcaacacctagcttgcctacaagtgcaaaatctttttcctcctgcagagttacttcgtccaactggggaatataggcaagttcacccagacgattcattttacatcctgggggagttaattctcctaaaagtaccctgagtaaagtgctttttccagcaccatttgctcctactaaaccaatacggtcataatcatatacttctaattcatttatatctaaaacatcgcgtcctttgaattccacacgaatgtcttttgcttttaatattaattccataacatttcctcctgtctataatcgcatgctttcatttgcttgtatgcagggaaaaccctgcgattttagcaggaagagttacatgaaaataagatacataaatattcctccaatattgtttattttaaatctaattttctaacctcagttatcatttggcaaactatagcaatgccaataattaaaatacctgatagtaaaaaccaatgatttacaccgattttatcagcaaagaatccagaaagaattaacccaattggcatagcaagtgacatgatacttccgatcaaagaaaatacacgtcctaaatattcaggcttaattttctcctgaaaaagagctgtttgcacaccgctataaaatggcaccgaaagccccattattgcacagcaaactacgaatattacaaatccatttggaggaagtattcccgaaacggctaaactggtccccattataaaaaatgaacttgttattagtaatacatgcttttcgaagccccctaatcttcctaataataagcctcctgctagcatcccaaatgcaaaggaaatttccgtaatagaaatatgcacaggtgttccattaaagtgttccatgcttattaaaggaaatagtgcattgattggcatataaacaaaagtatatagtgttcctaagagtaataaggcaaacaatcctttgttttgtctcagaaccacaactccttctttcatctcccttatgaaatttggttctaaactttgcacttgattacccagcttaggtatacgtacaattgctaccgtaatagatgcaatcacagcacccaatacgtcgatggcaataatagcatttaaatcccaaacggagtataagagtgctgcaactgccggactaacaatatagcttatagactgcaaagactgactatagcctgcgcatttcgttagctgttcttctggtactaaaagtggtgtaaccgcattgagtgctggggtatgaaaagctgttccaatgctacggataaacaatactatcataatcatccagacaggtagctccatacagaatgcaacaatagcaagcactgcaccagctgctgcgataattaaatcggcaccaatcattatcttcttcctatcatgacgatccactagcacaccaatggcaggtcccaaaatcgcatagggtaaaaaacctactaatgaagccatagacaagaccatcgcagatcctgttttttctgtaaggtaaaaaataatcgccatttgcaggatggcactagtgattaatgatactgcttgccctgcccatattgcataaaattttcgtttccaattgttgtatttttccatttatattatctcctgcatattattttgcttgaatttctattttgaatagcattctaggcaataaaaaatgcaggccaaaccccacaatgtggcttttggtctgcatacatacaatttggaaacattcatattaaagacatagttaaataaaggtatagttaaataaccaatatcctcaccgtaactaatgaatgctcaatatcgtataaataagcacaacaaaaaagcctatcatcgggtatagattctgctttttttattgccagcttatcttaaacgcattgaggctgtcatagtttcggttcctcctacatctttgtttatatcaatttatagtataacacaacaagatgatatgttcaatataaaagttatggaatgagactcatacttccaattcgatgccagatttaaaggatatgacgaagttttcttcatagactgtaacgctctggattatcttccttagtagcaagcgattagctttcacaaaatcttctgtttgtagttttaaaaattcatcaggattttctaactcaacctcaaaatatttcattttacattccctcatttcatttattgataaattgagtttgcaaaaaagagtggacaatttttgtctactcttaacctttaaaatagttttttttaatcgatttgaagttgcctaaattattacttattcggtaaaatgaagtattgctttcaacagatttccttcaactacacttcacttgattcaaacaaggtgggtacatttctattcccacaaactccttgtcaatggaaacaaacacgtacccacagggtaaatggaaatagaaactgataatttctagctatcacttctactcattccaaaaattttctcactctgatacttacccaccataaagcaaaaagccttgcaatcaaggctttcattatccctttcgttcaaaggtttctaagcttttacgagcagagcgacacactcagcggttcgctatctccgttctgtctgcgtgctagcacttgtcaatcacggacagctatcgcatgggcggaagtaaatgctaatcttcgtcgttttactccttgactagcaaacttaccgcctcaacatgtcctgtatgtggaaataaaacacgattaaagataagggaagatactgaattaaaaaaattccccctctattgtccgaaatgcagacaagaaaatttaattgaaataaagcagttcaaagtaactgtgattacagagccagacgcaaagacgcagagccgataaaatgagattaatacaatctcattttatcggctctttccgttatgtatggattcttttaattagtcttcgatgtttcttgcttcgttgataccgctggctaaagattccattaaggatagttctttgtctgtaaagctatccatgtatttctctatctgtaatcgtcgggtgctttttaccaagttattagcaggtaagaaaaattcatcaacggaaacatgaagtaacgatacaaggtcataaagaacttgtatgctggggtgttgccctttattttcaatattagttaagtaccgtgggtcaatttcaatcaatgctcccacttgttcacgagttaaacctcgtttcaatcgagcttctttaatggctaaaccaaaggctctaaaatcatatttatcttcttttttacgcatagtagaccacctctatacattttattgttcctactgaattaaaaacaggtatagaaaaacgtgttatatggtttataggtttatatttaataaaaagcactactaaacgccaataaaaaaaaccgttatatggtagtgctatttacgctgttaaaatattgtatattacttccaaatggcggtttgttggaggtcaacgtcgccatgaagtacatcatatacaataaatttccttacattgggttcttgtcaaaaaaagtcgtctatctgcaatagataagtacgtccaccaatgtggttttataaatcatatagatagaataacagaagcatgtaaacagagaaataaatctgtttatatgcttttttggctattcagaacttttttacaaagtttatttatcagtaatgcaacaaatccccctttcacattgggactaagagtgaaaggagataaacgagcaaggtcacttcctttcctagacagaaagggggtgagaaacatgaaaccatcttcttttcagaccacaatagaaaatcagtttgactatatctgtaaacgtgctatggaagacgagcgaaagaattatatgctttatctttcaaggattgcaaagcgtgaggtgtccttttcggatgttggcgattatcttgttagccagtttgcgacaacagataactattcaactgactttcagatttttacactcaatgggttatcagtaggcgttgaaaatgatttgttgagtgaagcattacgtgagttgccagacaagaaacgtgaaattctactgctgttttactttatggacatgagcgattcagaaattgcagacctgttgaaattgaaccgttctactgtctatcggcatagaaccagtggactagccttaattaaaaagtttatggaggaatttgaagaatgaaaacacaatatcctatgattccctttcctctcattgtaaaggcaacagatggcgataccgaagcgattaaccagattctacatcattacagagggtacataacgaagcgttccctacgacttatgaaagatgaatatggcaatcaaagtatggtcgttgatgaagtcttacgtggaagaatggaaaccagactgattacaaagattttgtcatttgaaattaagtaatatcctctctcctttcgtggaagcgtgctaaaccattccacgcttcccgaacagggaggtttgttattccaccaaagcatattgagctttcaatgtgttttgataggctaacgagccattgttctttgaaaactgaataaaagtaatcgaatacgtttcgataagaaaagagccaacggaactaaccgccatgacctatcttataaagatagcgagcgattcatgttagtgatccgagaagcaatctttagcaggattgcctgcaacgacattcttatcgtgataatgatactcccatacagtcaatagtccgagcgtgataaaaccgtcgcaggcaatgagtatggctacatgagaaccatgcaggggtggaactcccgtgagctttgctaaagctgttcgattgctggtaaaacaacttttatgaaatccaaataagtgatttggaaaggaggattttatgaagcagactgacattcctatttgggaacgttataccctaaccattgaagaagcgtcaaaatattttcgtattggcgaaaacaagctacgacgcttggcagaggaaaataaaaatgcaaattggctgattatgaatggcaatcgtattcagattaaacgaaaacaatttgaaaaaattatagatacattggacgcaatctagcgtcgccaaagggtcttgtatatgataaaatagtattaagtcgtatcaaggctctttccataaaggaaaggagcaaatgccatgtcagaaaaaagacgtgacaataaaggtcgaatcttaaagactggagagagccaacgaaaagacggaagatacttatacaaatatatagattcatttggagaaccgcaatttgtttactcgtggaaacttgtggctacagaccgagtaccagcaggaaagcgtgattgtacctcacttagagagaaaatcgcagagttacagaaagacattcatgatggtattgatgttgtaggaaagaaaatgacactctgccagctttacgcaaaacagaacgctcaaagaccaaaggttagaaaaaacactgaaactggacgcaaatatcttatggatattttgaagaaagacaagttaggtgtaagaagtattgacagtattaagccatcagacgctaaagaatgggctattagaatgagtgaaaatggttatgcttatcaaaccatcaataactacaaacgttctttaaaggcttcattctatattgctatacaagatgattgtgttcggaagaatccatttgactttcaactgaaagcagttcttgatgatgatactgtccctaagaccgtactaacagaagaacaggaagaaaaactgttagcctttgcaaaagctgataaaacctacagcaaaaattatgatgaaattctgatactcttaaaaacaggtcttcgtatttcagagtttggtggtttgacacttccagatttagattttgagaatcgtcttgtcaatatagaccatcagctattgagagatactgaaattgggtactacattgaaacaccaaagaccaaaagtggcgaacgtcaagttcctatggttgaagaagcctatcaagcatttaagcgagtgttagcgaatcgaaagaatgataagcgtgttgagattgatggatatagtgatttcctctttcttaatagaaagaactatccaaaagtggcaagtgattacaacggcatgatgaaaggtcttgttaagaaatacaataagtataacgaggataaattgccacacatcactccacatagtttgcgacatacattctgtaccaactatgcaaatgcaggaatgaatccaaaggcattacagtacattatgggacatgctaatatagccatgacgctgaactattacgcacatgcaacattcgattctgcaatggcagaaatgaaacgcttgaataaagagaagcaacaggagcgtcttgttgcttagtagtacaaatgaatttactacttatttaccacttctgacagctaagacatgaggaaatatgcaaagaaacgtgaagtatcttcctacagtaaaaatactcgaaagcacatagaataaggctttacgagcatttaagaaaatataaaaagataattagaaatttatactttgtttaagataaaaaaataacaagatttctcaatcttgctaatttttttgtcttatcattatgattttgttcagtcagtatgtagcctactgtcaggctgactgactaaattaaagtgattatttgtcgccaaaaactttgaaacgaccttctgtttggatgtctttatctcctgctggtgcaacgatttgaccaaatggcgcttgagcacggagtttccagttagctggaatgtcgtatttttcagctaattgagcatcaacaagtgggttgtagtgttgtacgttcataccgatattcttctcagccaaagccaaccacgtcgcataaagggcgattccatgaccttgctctgaccaaattgggaagttttcagcgtaaagtgggaattgctcttgaaggcctttcactacatcttgatcttcgtagaagaggattgttcccttagcttgagcaaaacctgccaaacgttcttttgttgcctcaaaaacttctgctggcgttactttttcaagctcagagtaagcaatctcattccagaaaacatctgactcttcatccagcaagatcaccacacgtgatgtttgtgagttaaaggctgtcggtgtgttaagaacagctccttgaatggtttcaatcaattcttggttagagagctcaaggtcttttcccaaagcataaattgaacgacgttttgtttgtaagtctgtaaagtaggtcatagttattccctctttctttgtgatgaatgttaattgttaaaattgttaagttttatttgtaataactttgattacaataaccattatagacctttcaaatgtaatgtcaacagttacgactcaaaaaatcactaattattgattttttcttactcctgtcaaaataccatcactatcctcgaatgttaacgcattagaagataaccatttgacctctgctccacgattcttagcacgttctgctatggtaatcaaatcttctttgtcttctacttcaaggacgtagtaggcaagaccaatcatccctttttcacgtttggctaagtttttgccaccccattcattgacagccaagtggtgatggtaatcacctgaagcaatccaactagcacttggaatggtatacttatctgccagctccaaaacatccttatagaaagccgttgctagctgactatctttgaccgataaatgaatatgcccatgcgagtatccttagctatcacaaaaggctcaaccttgcgtcccatctcgtaaatttcttgagctgatagttcttctgttacaccaacaatgcgaccatcctcacgaatatcccattcagcaacaggcttgtctctatagagctcaataccattgccttcaaggtcttccaaataaagggcttcactataaccgtggtcagctgcaccgacaaatggataatctagctcagcaatatgtttgaaaacatctgccagatcctcgcgagatggcaacaaaattgccatatggtagagaccataactggacttgaccgcttcctcacgattggtttcaatcaagtgaactagtggcttgtttccagcacccaaaacaatttctgttgcagtttgagataggatttcaagtcctataacctgtgtataaaaggctgtctgacgtgccaagtccttcacattgagtaccgtctccgcaaggtaaatcttactattgtagtcgtatgtcatatgattttctcctgtgttgtaattatatgaattacattataactttttctattgtcacgtcaatcattacaacttggaaattaagaaagaaaccgaaaaactttcgatttcttatagtttaaaatctaaaaatcaagctccagcttctttccagttggccttagcatcctttaaaataccagccaaagttttcttttcgagttctttttccattgccatttgaacgtcttctaggctctgatccaaaataccatggatattacgtcctactggacacgctggattaggattgtcatgaaaactaaagagtttgccacttggaccgatgctatccaccgcacgaaaaacctgcaaaaggttaatctcctctggtgccttggctaatgtggctcctccacttcccctttgaactgaaatcaagtctgctttcttcagttgcgacaaggttttgcggataataactggattaacccccacactacctgccattaaatcactggttagcttagtttcatttcccttattttgtgctataagggtcaaaatatggacagcaatggtaaagcgacttggtatttgcatatcagaacctctcattcatctttttcttttcaatcaattataacaaaaccaacgttgtaaaacaaggagttacaacaacttaaagagttagtcttacactaaaaaaatagagccatcgtagactctattcttttgtatttgataatactaactagactaataatacatagtattctagcctattgaggttctagattggtcttttgcttcttacgaacaccttgtccttcgatatgttgtttgattagttccactacttcatcattggttggtaaatccgagtgttgggcatcttcacctgtaacagtgatttcagtataactttttgcctgattctgatagatatatttcccagcggacacactagcatcgggaaccaattcgtccgaatcataggtaatggttcccgctaccgaatagacatgtagggtagccggaatattctccttagcagctataaagtctgctagcatgaccgatttatttttaatattggtttcagtgaaattatagggcgttccgatagtcatcaaagaatttatcttgacatcgtagtccctaagataattttcaataaaagctgtataaatcaagccaccatttgaatgtcccaaccctttaaaattattgaaattgtatttattctgcaaggcttcaaatgcctgattcatcatcttagtttgtttcttgatattgttatagccatctttgttattctcaaatccaataacaatgactggctcgttatccttatccttgattttaccctcaaaggtgatacgcccattgttccagaccttgactttgagaaggctatgcttgacgccacgacggtcttgattgagcttacgtactaggccgtcgaatctattttccgtagcggagctccctggaatcatgataatgggagacaattttgaattatagaaagtctctatttccttgacatttttcctagtccaactataggatgggacggctagcccaatgagaaagaaagcaacaaggataaagaccaacttagtttttttatttagtttcaatgctctctccttcctcttttagaccgtgttgtactttattagacagacgcacaaatggaataaagataataatgtcgactgcaaaacagagcagacttacagcaagagctcgtaaactacccccagttccgataaaggcgaaaagaagacttggtgtaccatctggaactggataaaccgcagctggcataagatgaatagccaaggccaccgcagcaatgcccatattgattataggtgccagtaggaaaggaaccagataaactaaattaagcaagactggtatccccaccataaatggagccccattgttaaagagactaggaaagacacttagaagactcaccttcttatccttataactggttgatgctaaaagcagagccaccaagagggctagccctgagccaatgccagcaaccaagccataactatgataaagatttgttagtgtgtaaaggtggggaagcccagtcgtcgtatgatgggaaacagcataggtcaaattttccaaggcaaaactatcctcggcaattgaatttagggcaaaagcctgactatttccaatccaagcagaaaaagtgttcaaaagtcccatcataaaggttgagaacaggtgattatcagttacagtaaaggtagaggtaacctgtctaatcatcagaaaaacattatcttgctctccaatcacaaagagaatgttaagtccaatagctaaaatgagtgacaaaaaaatgggacggacggtctttggttgataaatatagtccttgtccacaatctgatcatcactagctcttgaaaagcgaaaaatctggccaaccagatagcccacaaagatagccaacataatgttgattgaagccggtaaattgatgcgagtcaaaacaccatcgtttagcggtgacagcaacagctcctgcgatcctataattaagctaaccaaaagggatgtcacaccagctgtaccagtacttctaccatagtgaccagctgtgtattttcctgcaaagtaggttgataagggcccggctaagccaccaagaaagttggaaagattaatgagcacctgcccagttatcttaaaggccggtaaccagtcagaaactgaaaacaattggttaatataaccaagctccgaaaagacagatagcgaaatcacccgaataattcctgaaaataggaaaaagggaaagagcgaaaccaaggttttctgcgtaatttggacgaagcctcgctcacgaaaccagagaaacctctggaccaaatagtttgtcataaaagactcctagtaaaaggcaaaataaactttacattcaacgtttttcttcattataacacaaagagagaggccttaccttaatcgtgggttaaagcacacactatcagaatttagtcaccactattttcatgatttcttgaaaaatttaagaaatatttgagaatttcttgatgtttatttaatgactttatactacaataaagatgaaaagaaagcggtatcaaataagcgaaaggaggcttatcatgaaaaaggtacttgaggtcagacatctgactaaacgttacggccaacacctagcactcgacaatgtaaacctgaccttagaaaagggtgaggtctatggccttatcggaagaaacggagcaggtaagacaacactgattaaagtcatcactaaactcatccgccctagccaaggcagtatttccctcttccactctacctccaaatcagagtggactcacgcactgaaacgtgttggttctgtgattgaaacaccagttgccctgaatcatctcaatgcacgtcaaaacctacgttactactgcaagattcatcacgttccaaatcctgacaaggtcattgatgagatccttgatacagttggacttggacacactggcaagaaaaaatttcgtagtttctcactgggtatgaagcaacgtctaggtatcgctattgcactgattgcaaaaccagacctacttattttagatgaaccgattaatggtctcgacccagttgctatcaaagaattccgccaaatgattaaaaaattgagcgaagagcaaggtatgacagttctcatctctagccatatcttgtctgaactctatcaagtttcaacccgctttggcattattgatcacggtcacatcatccgtgaaatcactaaggacgaattcgaacatctcagcgaagactatatcgttcttaaaactaaccaattagccctggctagtcgcattctccaagaccaactccatcaacacttcaaagtggttaacagcgacaatgaaattcatatttttgacaaatcccatgttataaaggcaattgtcaaagagctggttaaacaagaagttgacatcgatgaaatttactacaaacgtcaagacttagaaaactacttcacacaactagtagattcagaaaggaggtagagccatgttacacactattcacgccgatttctatcgactcttccgttctaaaggattttggatttctgaaattatcctagccctaaacattatttctggtgtcctattgggaggcacagggcatgtaggcgtagaaactggggcaaaacaagccgttaaaagcgcctcttcgtggaccggtgtcggatcactgattaattactctagtagtatctccatgacagtcctcttcactttaattgtggtctctatcattttgggtgttgatttagcacaaaaattgtacaagaataatctcacctctggcatttcacggagcgggttcttcttcgccaaggcaaccgtcattgtagctatcactttaggacaactcctcctgtcttacggccttgcctttgttctaggtactctttgccacggtcttggaactgtacctgatcactttgttagaaactttgccttaactttccttctccaattcttgtgtaatctagcttgggtaagtctgaccacggttgccctctacctcacacattctatcgtgacaacctttgtgacttacacccttggtttagtagctttaaccgtaccagcagcagtcttccctaaagtagaaattttgaaatacttgtcactcaactttaattacggcatgactgcagataaaactatcattcaaaatactgcaatcgtggcagtagcatttatcctagcattcacagctttgggcttgattacctttgaaaaacaagatttatgagaacaaaaataacatcgtgcacgcgcgcgatgttatttttattctgtgacttcaaatccgtttctctccgaaggtgcgaaacaattcatatttttgatgtagaagtgtttgtttactttgaagatatctattttatttacgagagtttgtataaatttatggattctttcaaaatctaaaatataaaaaaagtcaccaacaaaagttgacgacaactaaaaaagaggaccaatgtcagtaagggttctttacagcctgaagctgaaggtagcaccgcacccgtaccagaagttggtacctttgaacgctctgttaccagtcatcctacgatatcctctcaatatttttattctatcactgaaagcaaatagaatcaagaaaagcagtatgaataatgttactttctatattttaaaagaattctagaatcaaagattttttgctaaatcaaatcggtggttgaattgttttccgaaattattttaacctcactgttaaataaaaccattcattctcataggccaaatgtaactcacccgctaagacttggactaagtgttcggtgatataaagtccaagtccagaggaatcctcggtgtctgacaggttttcagaataaaagcgggtcgttagttggtccagatgctgtatcggctgttggaccatattactaactgacaaataaatgccatcgtcctttttctgcaatgtcagttgagcttgagtcttaccatgttttagaacgttactgataatattctgaaatagacgttcaaaaatatctggatccatttcgcattggatatcaggggttacttgaatatctagtgtaatccctgtctcttgaaacatgtcatagtaaggcaggatagacttaaccacaagttgagaaaagtccacatcttgaaattgtggttggatggccccctctgttaatcgtcgatattccaacaaggcttccaaacgctttgaaacagtcagtagatttttagaaatcttctccatagccatatcatcatccctactacttcgaagactttgctgagcatagccgctcgctactgtcagtggtgttcgtatatcatgggcaatattactgatagccatgtccatggttttcttttcttggagagcgacaagcttagtcttttcaatttgggtaaaaagagactcaatccgattcgttaggataaccaatgattctggctggtttttcagagtaattcgtcgatggctttcttcaactagcttttcttcaatctgctttgagagagattttacagccaaatagtaacgaactagacaggtagtcgctcccagaagaagtcctatcaatacaataagcagtccttccatcagtcttctcctttaagtcgcacacctaagccccaaatcgtttcgatatactccgtacccgcatccacttgggctagtttcttacgtagattactcaactgtgcattcaatgtattatcacctgatagataaggggcttcccaaaccgtctcataaaggtcctctttagtaaaaattttctttggattttgaaggagtgtgtggaaaatttgaaactctttcttacccaaacgaatgacttttccctgacaggagacttcaaaactgtctgggtttatcgtgatatttttgacttgatagatgttatcatgcttactactttccttgctgtgttcacgtagttgaaccgagacacgcgcataaacttcttcaagatcaaagggcttaacgatataatcatttgcaccatcaagtaagtactggctaatcaagtgcttgtcacccaaggctgtcagcataatgacaggaacagagcttctttgcctgataaacttaagcacttcttcgccacccttacccggtaacatgatatctaggagaaccaaatcaatctcttgactttgaaacaaaagctctccttcggttccagagtaggcttggataatatcatgttcttcagaaaacaagttaaaaagaatattctggatatcctcattgtcttcaatctgtaaaatacgtgccatgtcttaatcctccaataatactaccaattgtatacgctcactttttctttcatcttaacaaaaagccaaattaatgacaaggtgcattatgagttattgatagcataaaaggaaaaataaaaaccgtaagcctccacttccgagacttacggtcaattatttattaagcaaaagtcgtcacatcagaggcatccagacgaacagactcaaagccttcttcattggctttcccaagagcaatgagcaaaactggtacatgacggtcttcatcaagtccaaaggctttggcaagcccatcttttttataaccaccgatggcgttggtatcataaccataagaacgagcaaccaacatcaactgcatggcagcaaggctagcatcgatgtggacaatttcattcatcatttcgcgaggagcattttcatacattggcacaatgcttgacagttgtttttctttgacttcttcaggcatttttccttgagcaacagccttaccgtagatatcttcagctctttcttggctcttcaaatcggcaaaaataaggaccatggctgatgatgtttcattttgcacaccattgtagctgacgaaaggtgtcaatttttccttgccctcttcgctctcaacaacaacaaaacgccaaggttgcatgttgactgatgatggtgctgtaacagtcttatctaggatttccaacagttcttctcgcggaatcttaacagatggatcaaagttacgaatggaacgacgattataaacgatatctgaaaaatcattgcatactacaggcatcttatgtctcctttttttgattaaatgaaaataatataatcaaaattataacataagacaattgttatcaaaaatatttgctacagacgactaaagattagtttccttgagccctagccgtttcacttcagatgaatagtaaaccatgatgacaataagactgagtgtgattacccagattgacttaaggtgtacaaaatgcatcagaacggctgagacgatagcaccaacgacaaagctccctacgataaagctataattgacagcctgacgacgatattctctctgatcaccacttccctgaatggcataatagagggccgttaacatccttcgataatttcctgaggtcataaatatcacgaagggatgattctcaatctgactgccagtaaaagtcttcatcatgatacctgcagaaaaagcgataatcgggagctcaatcaaggcatttgaaggtagaaaaggcaggatagctgtcatcacacaaagtggaagaagaccataaactcgccaataggcattcttacgctggtctttaaaccacataccaaaaagaaagcctaaagaaaagaataagattgaaaagcaacgcaacaagttatagtacatactactgtttcgccagtcagcgaccaagagaaggatattcccagtctgtgtagcaaccaaactatgatagtacatataacaaaagacatccaaagcccctcccgagaaactcaacaaattagccatcagacgcgtattttgaggaagaaggttccgcgattccatagcataacttcccttctaatagtaattgatatgatagccttattatagcaaattcgggcacacacagtagaaaaaagcaaccctcacgagttgcttctatcctattaaaaattaacggaatctgggatattataagtcttgatactaatagatatcacgtctatgaccgacttcgagggcaagtatgattagttcattgtcctgaatattgacaataacacgataggcaccaatacgatagcgccattgtccagtgcgattggcaaccaaggccttacccttggctcttggattatctgtgacacgattgagataagccttaatttgttttctgacgaaaggatccaacttttttaaatttttggcaaatataggggtgggtactatcttataggtcatcccaatttagcacctccccaccattttcaagatagtcttcatattctaccaaagccaaatcggctactctagcgtcatattcatcctcaatggcttctaaagttttggtacgaattaattctgacaaggataccccttcaaatttcgcaatggcctgcatgaacttcttatctgcttctgaaaccttcaatgtaattgttgtcatatccttaacctcgttctcttttgtaacaccattgtattaccactcctcctttttgtcaattttgataataggttcatacttttattcgtaaaacaatagaaaaagcaacccttacgagttgcttgcagtcctattaaaagttaactgaatcaggatcatcctgagttttaatgccttgaatcttatccaatactgccatatcttcctctgacaaatcaaagtcaaagatatccaagttggcttcgatattttttgctgtcactgacttaggtagtggcaagaaacctttttgaaggctccaacgtaaggcaacttgagcaacagattttccgttacgttcagccactgcttcaacgtcttcatttccaaaaatgctaccagtacctagtggactgtaggcttcaagaagaatgtcacgctcttggcaatagtcaaccaactcttcttgagcacaacctggagccaagagaatttggttgacatgtggcacaatttcagccgtttcaaggagagcttcaaggtgatgttgcataaagttagataccccaatagcacgaaccttaccatctttgtaagcttcttccattgccttccaagcgcctgcattgccagccttccaagcatcattttcacgaagagccttaggatttggccagtggatgagcaaaagatccaaataatccacacctaatctttcgagtgactcgtcgatagaggctttagccaattcgtaatcatgcttgtcattccaaagttttgttgtgaggaaaatatcctcacgcgccacatcactatcagcaatcgccttacctacagaaacctcgttaccgtagatttgcgctgtatcaatatgtgtgtaaccagccttaagtgcgaaactaacgctgttataagcttcttccccttctggaatctgccaagtcccaaaaccgattttaggaatcgtaacgccatttgaaagtgtatatgtttccatcctgttctccttttcaatttgtaacagaattatcttaaaaaatataagataaaaatgcaaagatttgctacggcttgtttgatgaatagttccttacttctttttccgcttctttttatagacaacaccattttctttaaggattttcatgctcacctttccaactcctctaatcgctgctacttcctcttccgttttctttttaaaatctttaaaatctattaagccatgttgacgaagtatacgctccacacttattgaaagaccttggagggctttgctttgttctatacttttttccaattctctaattagtttgtgcaattctggatttttctttttcgcaacatgtctttgtggacgttttacacgatatttttcgattaaccaagtaaaaaaatattctgactgggacagatcaacgacttgattaaaaaccatcaaaagacttttcatactattggcttcaaataagatagggttgactttaagcgtttcggcaactagacgctcgtcatcaccttgttcaatcatttttaaataattttcgaactctggattttttgcatagagaaaatcaaaatagaaatccgcatcctcaatatgtcccgtcattagagagaccgtcatcattggtactatcatcaaatcttcttcgtgatattccatttgctcacattcgaaaaagtttttagccttatcatagtcctccagattacaataggtagccatcaattcgtaacggactcccatgtgatcctgaacatctatctctagaatctcttcaaattccttaatagcaaaccgcttcatactgttgcttaaataaaatttagcaagattatacttcaaagacaaataaggacgctcgtcaagattagcccagcccatttttggaccttgatcccacttggacctttgctctttttctaaagcaattaggccttttagatgttcaagtggactttgaaaagttaagagcatctgcttagcatcaagattttcaggatctagttttaaagcttctgtcaaaaattcctgacttctcgaaggatcttcctcgtgataatgataagcctcttcaatgagtttccaagctctctcctgctttgaatcaggggaagtgatctcatcaaaaagcccttggttgtattgtcttgcaaaatcttcaagagccatgtccacactgagatactctgtaatatgttcttctaagaatgcttctgctttttttgtgaagtcttcaaaagatgatgtcatcaatcttctccaatctatgtttatttctctatctactattatatacgtttttatagaacattactatattctaagtgaaatcaacaacctcttaaatttttattgacaaaaatagtcgccaatcacaatacagataagaatccatagagtcttattttgggacatctaaactcaaagttgtatacttatattagatagagtgccattggacgattaacgtcaaggcataatcttcaagtttcatttaaagctacaaaaaatcattaacgccttgggagtggtttagtcccttctctatatcaataactttaactcactttttcataattttacttgaccactcccatttttaaaggaattgaaaactgagttatattttaaaaggaaacagaggtctgtttccttttttcttacttcaaaccatgacaaaaggaaaccctttcgagtttcctttatcaaatatatcgttggaggcaaagtccaataatactttagttgagtggttcaatcacgaagctcaattgatagctatctgctgagctaaccaagaattcgtcatgaactggagcaccccatgagtcgtcaccaccgacacccatttgagcagcaagaactttaatccatgtagcatcagattgttgcaattcatattgatgacgagcattttcaatttgttcagtactgttacgcaaagcactgaattcgaatgccttattaagtgcggtgaatttaagaccattatggttatcatcagatactgtaaattcacgagtaccatagtgattaccagattcttgtggcattagatatggagcaaatgtcttttcaacagatgtttcatatcgaccaagataggcaccaggaagtttatcaaggtagctttcttctgcaccgtatccataatagcttaggtttgtaaattgtgaaccgatagcaaattctagaccaaattcagggaagtttggcaaacctgctttaccatcatagtttgcagtaacaaagattcgacccttgtaatcaacttgataagtcaccttaacttcgacatcagacaagccaggcaattcatgaacataagtcactttaacagagtcatcttcaatttgaatttgagtatctgtaaccttactatagtttccagcaactttccagcctgccatttcgaatggatatccagcaccacgatcgttgtcagtgtaagcacgagtaaagttaagtttaggacctttctcaatgaattcaacaccgttatacttagcagatactagcgtattttgtgcacgtgaaagcaagatagagaagttttgtccttgaattccgatgttgaagtcgccttcaacaacattcaaaggtgctttaactggtgtttcagtgctaatcttttcagcaacatattgaccacgaataatttcatgtccttttggagcccattcagttgcttcattctgaacacaagcaacttcataaattcgttcagcatttgaagctccaacagcgaattctactgggaatgttgcttcttcacctggtttaacatcaaagtgatattcactttcgctaacttttctaccatcttcgtaaactctagctaggaaagtataagcagaaagatcttcaaagacattatcattcttgatagttactgatttttcatcaacagcaatcttaatattagagtaaagatgtttaactgtttgaagttttggagttagggtacgatctgcgaagacaataccatttccacaaaattcgtagtcagaaggtctatcatgccagtcaccaccatatgataggaattcgctaccatttggaagtggtttgtaaatagcttggtcaatgaagtcccaaataaatccaccttggtattctggatatttctctaaatcagtgtagagtttcaatccaccaccagagttacccattgtgtgcatgtattcacatgaaatataaggtttttgaggattgttagtgaggtattcttcaatatcagctggtttcgcatacatacgactttcgatgtctgtaatgtaatcaaattcacgacaccatgtaacaccttcatagtgaactggacgagtattgtcaacactacggaagtaatcagccatgtcagcaatatctttaccagcatatgattcattaccacaagaccaaatgataacactagcatggttcttatcacgttggaacatgttattggcacgatccaaacaagcaggcaaccattctggttcactagctgggatattccatgaaggttcgcttagaccaagtttttgccatgtaccgtgtgtttcaaggttggcttcatcgataacataaagtccatattcatcacacaattcataccaacgtgtttggttcggatagtgagaagtacgaacagcattgatgttatgttgtttcatcactttgatatcccaaagcatatcttcttcagtgatacaacgtcctgttctagcgttaaattcgtgtctgttaacccctttaaagacaattctcttaccattcaaaagcatgagtttatctttaatttcaaagtgtctaaatccaaccttaactggaacgacttcaacaacttggccatcatccaaaacatgaagggtcaaattgtaaagtttaggactttcagcactccaaggtttgatttgcaaatcttcaagacttacagatagttcaccgtcagcattaacagatgcatcaccttctttaacgatgccttcatgatctgaaagaacatatttaatcttcttatcttcgtaatcaccaacagtcttcaaatcaatatccaattgacctgcttttgtttggtaatcataatctcccttaacaaagagatcttgaacgtgaacttttggaatagcatacaagtaaacatctctgaaaataccgtaaagtctccagaagtcttggtcttccaaccagcttgctgtagagtaacgataaacagctaccgccaacttgttatcaccttcaacaaggtaatcactaatttcaaattcactaggtgtaaatgaatcttcactgtatcctacgaagttaccattgacccatacaaagatggaagtggcaaccccttggaatgagataaatacttttttatcttttaatgcatcattcaaggtaaaatgtttaacatatgatgcaacagcatttgattcttgaggaacttgaggtggacgaaggaattctttaccatcccaaggatattgggtattcacatattgtggagaaccaaaaccttgaagctctaaatgacctggtacattgatgaaattcaaatcagtttcatcaaattctgttttataaaagtcttttaaaacttgatttgtattctgagcatagtgaattttccattttccattaagagattgtcttaacttcatctccccttcagaaaattctgcaagagattcaaaatacttatgatctgagtgagcgtcaacagtattgacgctaacaatctttggatcgtttaagtaagtttgaattttttcagtcgtgttcatagattattctccttttttgaaggtaataacttcagacaaagcttctaccttttctccaacttcttgttcaagatggaaagcactgaatttttctgaattagttacagtgacaagtactgtgtcatcaagaccatttttctcaataattggtgaccagaactcaagaagtttttgtccaacttcaacacgatcaccttgttctacgtaactaatgaatccttcacctttaagtttaactgttccgataccaacgtggataagaacaatgacaccatcttcactttcaataccaactgcatggcgagtaggaagaacttgacgaatggtaccactaattggtgcaaagacagctccatcagtaggtttaatggcgaaacctttacccatgctacctgaagcaaagtgttcatcattaacacttgagaggtcaaccaaatgaccagttgtagggtttacaagagatacgacgttagctttaacttcattttcagaagttgctacgctaaagcgatgttccaattcttcaacaatttcagcgtgacgtgcttcagtcaaagtgattttacgagcaataatgaaggctccgatgagcatagctgctgctgggaaaccaaacatgctaagcttaaagatagactgttgatgtgttgtaattgttgatgctgaggcacctgttgtcataccagcagctacggcaattgtagaaacaagccagtttgacatcgcaccaccaagtttatcaacaagtggacgaactgacaaagtaagtgattcatcacggtgtcccaatttccattgaccatattctactgagtcagagataatcatgaggataacaaggaacacaagaggttgtggaataaagaagagttcagcagcagtcaagatcattggaagtgatgttcctgcaatactaaagattccaataccaccgagcattactgcgatacatccatagaacaaacgtttacggttgaatttaccagctaggctagggaagagtgaaactgaaaccaaaccaacaactgtattcaatccgtaaaggattgagtatttccctggatcaccaaggataaatgtgaagtaaaaaagttgaagagcattaagtgtattaataccaagaccatagaaccaatatccgagagacaaccacatcaattggtcgtttttaccaagaactttaaagacttgtttaaggctagttttttctttgttatcacgaagttttgactcaacttcacgtgtaccaataccaacagcaattgatgtaatcacaccaatgagagcaacgataaatgcaaaccagaaccatccagatttatctccagagccactgctgttcgtcattgagaagaacaaaacgattggcatgatggcaacacctacaatattggcaccaatcgtagaaccaatacgggcaaaagttgccattttttcacgttcatgactgtcaagagacaaggcaggaatcattgaccagaaaccgatatctttaattgagtagaagacgtccattacaaggtagataattccgaaaagtacaaggtacaagaaaggatttgttttattcaaaccacctaaatcggtgaagagaagcaacaaggcgatagaactgatgataccaccaccaactacccatggtttgaatttaccatacttagtatgagtgttatcaatcatgttaccgatcaatggatcgataaatacttccaagatacgcaaaatagcgatgatgttagtaattaatagtacgtagtgactattttgctttggatcacctgtgttaaacaagtgagttgtcacaaacatgataaagtatgttgacaacgttgcatagaagacgtcgttaccaaaagcaccagctgaataggatagacgagacttcatttgacctttagattttcccattacgaaaacctcctgttagttgttttttgattacgcttacattatataagtattagtttaaaccgtcaatagttttagtgatattttactaaacttttactaaacataattattttgatgaattaaaatatcggaaaccgatttcatagcttacactatgcccctcctccaagatgatatctccaaaatctctatgattaacggcatctgggagtgtttgtgcttccatggctatagcttctcgtccttttgcaattgttcctcgatctctcgcaaagtaaatattatcctctatattatccatagtataaataactaaaccatttctgttagagaagatttcaataccatctccgctttctttgtcatgcaaaatagctacttctttcacatgatcacaagtttcccctccaactacaaaggcatcatcaaaaccgttatttgcttcaattcgaggtagtaagtcagttgtctttctaaaatcataattcgttccatctacattaattttttgtcctgttggaattaactcagaatccaactctaaacgatagtctgaatagatttgtaactcatggcttgataaatcctgtttgtcgctaagattaaagtaaacatggtttgtcggattaaagactgttgactctgtaacatcgaaggcttcaaagagtattgttaagcggttattattgttaagtctataactaatagagactgtaacatcaccaggaaagccatctacacttgaataaagtcttctactaaatttagtctcaacatagtcatcattcaggtttgtgacatagttccaattttgaacctgcatcccttttggaccaccatgtaaacagttttctccctcattcttaggaagactatagagaaccatattgtgagtatacgaagctttcccaattcttccagcaacccttccaatggactggcaggcacataagttattcttatagtaatcctcgtaatcactgaaaccaagtactatatttttaagagcaccagtttccgttggaaccaaaaactcctgaagtgtagcacctgttgtgagtgtggaaatgacaacaccattattattttccattgaaattttactgacatcgcctgaatcaacttttccaataatttcgcagcttattttcatattttttcctcaaaaaacaaagagtacaataattatatatactctttgaccctttgtttattattttaattatcctcgatcatcgtacccttttggatggctagaatgccatgcccaagcacttgcgatgattttttcgatgttatcaaattgtggtttccatccaagaactgtacgtgctttttcagatgaagcaatcaatgtatcaggatcaccaggacgacgatcagctttttcagctggaatttctttaccagttaccttacgagcggcttcaaggatttgaaggtttgagaaacctgttgatgaacctaagttaaaggctgtagattcattacctttacgaaggtattcaacagcaaggaggtgagcatcagccaagtcaaatgggtgaacatagtcacgaacatttgttccatcaggagtgttgtagtcatcaccaaaaatcatgattttttcacgaacaccttgagctacttgaaggataattggaagaaggtgagtttctggaccgtggtcttcaccgatagatccatcaggttttgcaccagcgacgttgaagtaacgaaggggcacatatttaataccataagctttatcagaccacttcatgatagtttccatcatcaacttactttcaccgtatgggttgataggtttttgtggtgttgtttcaagaattggaatttcttctgggataccgtaagttgctgctgttgatgagaagacaatgtatttaacaccgcattcgttcataacttcaagcaatttaaccattccagctgtattgttatcaaaatatttgagtggtttttccattgattcaccaaccaatgaataggctgcaaagtgaataacggcatcaacatctgggttttctttgaagacctttctcataaaatcttgatcagagagatcgccttggtagaaaatagcatctggatgtacggcagcacggtgaccggttaccaaactatctactactactactttttcttgaccgttttcaactaagcaatcaaccatgtgagaaccgatataaccagctccacctaatactaaaattgccatttcttatctcctttcttcagaaaaaacaattaatcagctaaatttacaaaatctacaaatgctttaaactgatctaagccttcactattagtcttataaacacctgcatcttctagtacacgagcaaagatatctgcaacagattgtcgaacaacttctgttacttcctcggccgtaacatttgtattttgagctttgagttcatctgcccattcttggtgaattggagcaacttggttgccttgacccaatagataatcttcaacatctttaagttctgttttcaaacgaggtggaagaatggctaatcccataacctcaatcaaaccgatgttttctttcttaatgtgttgaacatctttatgtgggtggtagataccgtctggatgttcttcagaagtttgattgtcacgaagaaccaaatccaattcaaatttgccgtcttttctacgagcaattggggtaattgtgtggtgaggttgcccatcagactcagccaagactccagctttttcgtctgaatagccacgccagcaatttagaattttggttgcaagagcaataagtctttccttatcttcacttcttaaacgaagaactgacataggccaattaacgataccagcctcaacatcagagtaaccatcaaaactaactttttctttaatccctgctacttccattgggaaggtatggcgaccaccttgatagtgttcatgtgtaagaatcgaaccacctacaattggaagatcggcatttgaacctgcgaagtaaccaggaaatgcttcaacaattgataggagacgaccaaatgtcaatggactgatgtgcattggttcgtgcttaccataaaagaagatagaatgttcattaaagtaagcatatggtgaatattggaagccccagtcatttccttccatttggaaacgaataacacggtgattactacgtgctgggtgattgatgcgaccaagataaccttcattttccatacaaagttggcattttggataatcagaagctaccgcatttttagcagcagcgatggcttttggatctttttcaggttttgaaaggttaatcgtaatttccaagtcaccgtatttagtaggtgctttataagcaatattttgtgcaatggctttgactttcacataatcatttcgtttactttgtgcataaaagtcagcaattgcttgctctgggtcagatttataagtatcccagaagttacgattgacaaggctagggcttggtgtaatcaagtccatgagttgagcaccgatgatatcttgttcttcattaagttcacctacagaaccagctttaacacctgcttgaagcaactggtctttaaggtcaatcaattcagagctttcagtttcgacatcagcaaccccctctccaaccaaagcaaaaactttgtttgtcaaatagatacggtctaattcctcatagtcactgttttcaataaccaaagttacaaaagcgtttactaaattttcagccataatctctacttctttctcattaatcaagtactcgtgaaccaccagctacttcagcgatatagaagcttggtgcataaccaacgacttcttcataacgttgaccaactgcttttttaaagtcttcaactttatctttgtttacaagtgcaatggcacatccaccgaaaccagctcctgtcatgcgggctcctaatactccttcttgttcccatgctgtatgagccaaagtatcaagctcaagacctgtcacttcgtaatcatgttccaatgacacgtgagaagcattcataagacgaccaaagccttccaaatcacctgattcaagtgctttacgagcttgaagtgtacgttgattttcaagaaccgcatgacgggcacgtttgatacggttttcatctttaatcaagtagctgtatgcatcaaatgtccaaaggtccaattcaccaagtgtttggatatcaagtttttcttgaagttcagatacagctgtttcacattcagcacgacgttcattgtatttagaatctgccaattcacgacgtttgttagtgttcatgataacaacaacattatctttaaggtcaagcggcaccaagtcatactctaaagtatttgtatccaagtaaatcgcacgttgatcagctcccataccaatagcgaattggtccatgataccagagttaacgccgataaagtcgttttcagtttgcttaccgattttaaccaagtcaaggcgttccaatttaaggtcataaagtttttcagcaataacaccaatcaataattccaaagaagatgatgatgacaaacctgatccatttggaatgttaccataaatgtaaatatccatacctgagtcaatcgtatgaccagcttcttgcaagaaatgaagaacaccttttggatagtttgtccagttgtgttctttttcaaaacgaagattttcaagtggtacttcgatgatgcccttatcttcaaagttacctgagaagaaacgcaaaactttgtcatcacgtttacgggctgctccgtaagtacctagagtaatagctgctgggaacacatgtccaccgttgtagtccgtatgctcaccaatcaaattaatacgaccaggtgaaaagaaagtatgatctgcttctactccaaagacttctttaaaagcttctcttagttgtgttgttttcatagaattttcctcgcttattcttttttacactaacagtgtaacccctttcacaaggaaaatcaatatttttactgtttttttagtaaaaaataggtaaaattttagaatttatgatatactttggatgaaaggagaacaatatggctacattaaaagacattgcttcattagcagaggtctcaatcgcgactgtttcacgtgttctcaaccaagatgaaagcctttccgttactgaagaaaccaggcaccgtattttaactgcggcagatgaattgggatacactagacaccaaaaaagcggtaattttaagaaagagaaacaccagattgccattatccaatgggtcagtgaagaagacgaattagatgacatctactattataatattcgactcggcattgaaaaaagggctcaggaactcgactacgagattctacgttatttcaatgacattccttttagtctcgctgaagaagtcataggtatactttgtatcggaaagtttagtcgtgaacagattactgaattggaatcattgggtaaatcactggtctttgtagatagtgataccctacttcagggacatccttgtgtgacaactgactttgaaaatgctgttcagactgccctccaatatttaaaaaaacaagggtgtcaatcaatcggacttttaacaggtgaggagaagacaaccgacttgcaagaaattattcctgattcacgtcggcgtgcctatcgcaatttttgtattgaagagggaatttacgacgctaatctcattttgacaggaaactttagtgcgctatctggttatgaacttatcaaagctaaactggagacagaggagaaacttccagatgccttttttgccgcaagtgatagcttagctattggagcactcaaagcttttcaagaagctggcctcattgttccagatcagattcaaatcatttcttttaacgatacaatcatggcaaaacaggtatttcctcccctatcttgtgtcactgtctacactgaagaaatggggcgaactgccatggacgtcctcaataagcaagtcttgtccccacgagaaattccaactcttaccatgttgggtacgaagttaaccttaaggggtagtacgaaggaaaagacaatccaactgccaactaacccatgattactcaatagactaaaaagtggtcgtcaactgtaggttgacaaccactttttatttcatcttcacacaaatggcatcccaggcttggagtttgccttggtctgtaattggctctaattcggtatttgcaatgacaacttctgctctttcgaaatcataacagaagtcttgttcttggtctgataaattgactacaaccagatagctactatctttagtcttacgaatataagcaaatacttttgaagctgtctccaagagttcaaagtcagcatctaccaaccaatcttgagttttacgaagcgcaacgagcttctgataggtatagaaaatcgattctggattggcaagggctgattcaacatttatgtccttatagtttggattaacaggtaaccaagtcttatccgatatgctaaatccagcatttttagaagtatcccattgcattggtgttcgagcattgtcacgacccacctgacggatttggtccatgataacttctatcgatgcccctttttcgagagcttctttggcatagttgagagattcaatgtcattcaattcttccaaagttctaaatggataattggtcatgccgatttcttcgccctgataaatgtaaggtgttcccctcatcagatgaaggaggatagccaaggccttagctgacttctcacgatagacaccagtatctccccacattgagagaatacgaggcagatcatgattattccaaaaaagtgagttccacccttgtcccaactctaactcggtttgccatttattaaaaatagccttaagcgctgtaacatccaactccttctcatactcccatttaggactatctggcttatgctgaagtccaatatgttcaaactggaaaaccatggaaagttcttgattatctggatttgaatactgtttagcaatttcaggtgttgctccccaggtttcaccaacggttagaaggtcgtgctttccaaagcttgcctggctcatctccttgatataatcgtgaagttttggaccgtttgtatcaatcagttgatctgggatcttaccaatcatatcaatcacatccatgcggaaaccaccgattcccttatcaatccagaaattcatcatgtcataaactttctggcgcaactgtggattttcccaattgaggtctggctgtttcttactaaagaaatgcagataatattgacctgaggtctcatcatattcccaagcagagccactaaagatagatactaactcattaggtttgtctcgccagatgtagaaatctcgttcaagactttctggattttcacgcgcttcgatgaaccatgcatgctcatcagacgtatggttaaccaccaagtccataacaatttgaatatcacgcttcttggcttccgccaaaagctcatccatgtcactcatatccccaaaaatatccgcaatagcctcatagttagcaatatcataaccattgtcgtccattgggctatcataaacaggagaaagccaaagagctgtaattccgagtttttgaagataatctagtttacttgtaatccccttgaggtcaccgatgccatcaccgttggaatccatgaacgacttggggtaaatttgataaattgtagccttgtgccaccagtatttttgcatgattctactcctcgtagttattattatcgtgagtctgatagttctattttacgtttttctagaagttatgcaagcgttttcttttgttgtttaaaacatttcaatgacctatactccggactccataaacttttggtaatattgaaaaataatagagttgaaatgtaaggttagcctttgcttattttaacaatacaaaaaatgacagttaataccttaaccgtcgctttttactttttgggcaagaccataacaaagcgcctccccgtagaactttcttcaaatctatagctaagttcctcatgctctaaaaggtatttgaccacaaaaaggcctaatcctccttctttcttagactgagctttagttgaaatattttctttagatacactcgtattttcaatgacaaaatcagttccttcattttctaaatctattcgaatcactccacccttatcagaatgcttgactgcattactgatgatatttgagagaaccaatttcaaaataggtaaattcatgaaaatactagttgccggaagataattgtcaattaatagggagcgattctcaaccaacacttgattttgagtaagtatgcgatttaccacatcatctaactgaatccactccttatcaccacctaattcttgaacagaagataaagacaggatctctaggacaatctggttcatctcatcgacgatatcgagggagaccgccagatagcggtcccgatccttgtagcgaccaattttatctcgcatattttctaggataatcttcaagctggccagaggcgttttgagctcatgcgaagccccccgtaggaattccaccttcatctgctccaacttcagattttcctgtttctgctgctctagattgtcgatcacctctaaaagatgatgatagaggtcgttgatctgttgcttaaggacaccgatttcatcctgcgagtgaataggaagactggctgtccgatccaaacgcttcatccgcttggtcatctgcttgatctccaggatcggagcagaaatcatgcgggcatagagataggaggcaaggagtgacagaacaaaggaagccagaagactatagggaagaaagcccagactgatgtcccgcgcttccttttgggaatcgacagttgctaagaattgcaaggtcaagtccttcccctctttagtctggatctttcgctcctcaatgaccagggaattgttctggctatccgggttcaggagcaagtcatccttgacctctagggcattttgtttttcctttcccttgatcgagaccttgatatcattggtcttggaataaaggtcgatgaccgactcaatggttccttcttccttgccttggaaactcttggccagggcctgcgatttcttcaaaatcgtctggcgctgggaatcgatataggtagaggggaaaataaagtaaaccgaagcatgtagaaggatgactaagccactaaaaagggcaaaggtgatcagaaagatctttgcaaagatacttcgtttggtcatggtctctccaatttatagccgacattgcgtaccgtaacgatacagtccagctctagtttttttcgtagttccttgatatagacatcgattacccggtcaaaaggaatctcctccgtctccttccagacggcatcgaggatctgagagcgggtccgggccttgccctcatgctggagcaagtattccaagatttccaactccttggcattcatggagatggcttgcccagctaggctggctgtgtagctctcaaaatccactcgtgcctctccataggtgaagacccgggaaggctgaagctttttaaaaatagcttcgatacggaccttcaagagggacaaggaaaagggtttttccaggtagccgtccgccaactctccaaaggccgtcaacttatagtcctcgtcatggaaggccgtcagcatgaggacagggaccgagctggtcttccggatggtcttaaggacctccaagccattgaggatagggagctggatatccagcaagaccagatctggcgcttctctgtgaaagaggtctagggcctcctgcccatcgcctgcttcaaagatctcatagccacattccatgagatagtcgctcatcccttcgcgaatcaggacttcatcttctacgattagtatcttcatacattatccttttcatctatatatagtcgctttctttcattataccgttttttataggtgcagcaaacttatcattcaacatcaactaagagatctttgggtttcttgtgaagaagccagcgagaagaaatcaaggataccaagcttaagataaagccaccgactagaatgactaccaaaagttgcttaggttggactgtcatatgaatctgagtcagagtcttactgaagctctctgcctcagcccctccaccgagatttgcagctagagattcttttgtcatttgcttattgataccttccgtaacattggaaaggactgttttaccaactttttcggcaaagaaactcgctaaaccatatgataaaagaaagtctggtaaggcaatcatcagtaattccattaaaaattgacccgcaacctgtgtctttttaagtcccaaggccaaaaagataccaacttctctacgacgagcatttaaccataaaatcaacaaaagggttagcaataaacttgtaaaaatgagacttccaataaacatacgatttgccacacgatacatcccaagaatagattcctgtaaagcagggtagtttgatgaactcttaacaagatcgtagagggtccagttaatgtccaacttttgaatctttgctatcaaggaatcaagattttgatcacctttagcaaagaaagtggcatcctcataagtggcagtttctaccgtatttccatagagttttgcagctgtgtctagatcagtgatgagggtgttttcatacaactcctgagcgtaggtaacggctgcttgattttgaccagaaaataaacctttgatagtcacttctactgtttcatcagcccttttttcgttatcagcatcatagagattagatttaagctttactttatctcctacattaagaccattctttttagctaaaccttcgtgcatcaagatttgattatggtccttatcggttagatgttctccttcaactagtttataagcacctgaaacaaatttatcttcttttgatgagtcattgactcctgtcaacatcaaggtagacttaaaatttttagcacgttctggcgattgattttgtagcgtttgctctgtttcaataatctcataatctagtaaatcaccaataccatttatccgtttaatagtcgaaacaattcctttagtctcactaatctttttaatatcttctcccttaagatttccagcccctcgaggagttccaggattcgtgttacgattaatctgcattgaaaaactattggtaattgcccctagactctttgatgcagcttcttgggttgcacttcgcatagcaagtcctaacaaactaagagtactcatcaaaagaataatagttaacagtaatagtgactttgaccattttcgtgtaatatatgcaaaagcgtttcgaaacataagagtcctttctttattttttcttttctatgagttgtttcttcttcaactctaaaaccacatcagatgcctgagcaacttccttactgtgcgtaacaactatgacacatttttggcgatctaaggccattcttttaaggatagcaataatatccttggcagtttcgtcgtctagatttcctgtcggttcatctgctaagataatcggagcctctgaaaccaaagcccgtgcaatagctacgcgttgttgttgcccacctgaaagttgcaggacatttcgattaatttgtttttcatctaatcccaattcagaaagtatcttcttatcagcatttttattaacaagtcgtacattttctaaaggtgtaagataatcaatgagattgtaattttgaaaaacaagcgcaacatggtgtctacgatgataactagagctttttttcttgatattttctccgttaaacaagacctgccccttcttgggataatcaagacctgccaaaagggaaagtaaggtcgtttttcccgctccagattgcccaataatactataaaatttacctttctcgaaacgataattcaccttcgagaagatagcttcacttttattttgataactatacgtaacatctttgagttctaacatagtgttcctttctccttaactcatattagataagatttcttttggagttttgcgccaaatgagacctgttgtcacaccgagcgataagattaccaagactagaagacatagataagatagccctaaaggtagtccctgaggaatttgatctaataactgaagagcctgctgctgtccttgctgtcctataaattcttgcaaaaacagtcgacttagtagtcgtccaatagcaagggctggtagcaaagacataagggacaccaacaatatctccataagaaattgagcaaaaatgcgtcccttgctcttcccaattgctaaaagaatacctatctcatgatttctctcacgcgtccatagtgccattaaaaacgagaggatccctgctcctgtaacaattaaactaatcatcatcgttctgactatttcttgtagcgcttgagacgattccttcaaggagtcaaaagcctttcggtcctcgtctaaacgtagacgataccaatcgatatctaattgttccacttgtttaatgacttggtcgattctatctggattcttaataccaaaggataattttgtcactaacttatcagtcaaattaagcagctggctagagtcctcataatggaggaagacttgattttcacttaaatctgaggacattccagtaaatgtctcctccttcttgccagaaaaaataccaacgatatcaaagctcattttcttagctctattttcagtcacctgaaaattggacaaggtcagcttgtctccgacgcttagcttattttttctagcaagcgattcatgaatcataatttgacctttagtagataagtgctttcccttaaggagttgaaaagcaccactcctaaaatcaacactttgccctgttcccttaatgaaagtggctcccaaggcttgattagcctcattatcaaggtcatcacgtttcaccgtttgttttcctgtaacgaccttcttatcgattagtcgtactggacttatatattcaggtatcgttgaaatcacatcagatagatgactaatcttttccccctctttccaggaaaatgcactgcctctttctttacttaccagagcaaaacttgccccacttgacttcctgatttgtgctttcattcctccaccaacttgcataagagagaaacaaaaatacaagcaagataatatcaaaaataaaatgagaaaaaggataaaattccgcgtttttttgcgaaaaatataagcaactgcctgttgtaagagaaccatcttccacctccatttaagacattggccctcagctacaccaaagataaatgaggactcttcatttttcttatcctaattatagacgacaaatgtgaaacctttatgaaattcaatattctaaagtgattgttatctaaaaatctaactgctgagatgaggactccaattaaataataactctaaaggactatcataaaaaattcgtttcatgattgacttcacctctttttctcccataaatcgtctatcgccaatagcatttaccctcggcatttgatataatttttctcagaggtatttttatttatgaagaaacaagcttttagttctgaacagtatttgaatctgcaacgcgaccatattttggatcgcattaaccagtttgacggcaagctctacttggagtttggtggtaagatgttggaagatttccacgctgcccgcgtccttcctggttatgaacctgacaataaaatcaagctccttcaagagctcaaagatcaggtcgaagtggtcattgccatcaatgctagcaatatcgagcattctaaggctcgtggtgaccttggcatttcctacgaccaagaggtccttcgtctgattgataaattcaacgagcttaatatctatgtgggttctgttgttattacgcagtattctggtcaacctgcagccgatgctttccgtaaccaattggaaaaaaatggcatcacgtcttacatccactaccctatcaagggctacccaacggatatgaaccatatcatttcacctgagggtatggggaaaaacgattatatcaagactagccgtaaccttatcgtcgttactgctcctggtcctggttctggtaaattggcgacatgtatgtctaacatgtaccacgaccaaatcaatggtatcaagtcaggttatgctaaatttgaaaccttcccagtttggaatttgccgcttcatcacccagttaacttggcctatgaagctgccactgcagaccttgatgatgtcaatatgattgacccattccacttggaaacttatggcaagactacggtaaactacaaccgtgatatcgagattttcccagtcctcaaacgtatgcttgaacgcatccttggtgagtcaccttacgcttcacctacagatatgggtgttaacatggttggttttgctattacagatgatgaggctgccaaagaagcttctaaacaagaaatcatccgtcgctattatcaaactgtacttgatttcaaaaatgaacgtgttcctgagactgctgtcaagaagattgagttgctcatgaacgatcttggcatcactcctgaagatcgccaagtggtcgttgcagcacgtgctaaggctgaagaaacaggtggttctgctcttgccctcgaattgccaaatggacaaatcgtcactggtaaaaattcagaactctttggtccaactgcggctgctttgatcaatgctatcaagacttctgcaggtattgataaggatactaaacttatcgagcctgaagtggttaaacctatccaaggtctgaaaattgaccatctgggtagccgtaaccctcgcctccactcaaacgaaatcctcattgctttagctatcacagctgctaacaatgcggatgcggcgcgttccatggaggaacttggtaacctcaagggttctgaagcccactcaaccatcatccttactgatgaagataaaaatgttctccgtaagcttggtatcaatgtgaccttcgacccttactatcaatacgacaaattgtatcgtaaataatgcatgactagaaacaacaaagacctcagttttactaactgaggtcttttagaattgcatttagttggagaaagaaaaaagggaaactctatcgagttccctttttgataacccactctttcgtctcgacccgttcccaatgaaaagggagtggcctagcattattatgaaaaagtgagttaaaggtatcaaacagagggctaagccactcccgattctaatcagcctacgatttctaacttgagaaaaggtaagctaaaaagcaaaattatagtagataggactgccacaagtgggaggtaacgacctccaacaagatagagtaacaatggcgctatcgctataaagcgatttagaaaattgctagtaacacgaacggtttgtccgtcctcaacagtaatggtgttagacttgtaacccaactttccgacactcaaacgagctttcgacgatggtagggaaacgctcacgtcttccactccagaaactgtccccacaagactactgtctacgcgaataggactctttctagctaccttgctcgcttcaattgttatactagccactagccatctccttttcctatctttctacttatagtatacactttttgaaacgcttacacaagcgtaatgactgttaaatcaggatttcttgaaaatgttttatgttttcaaaagttcttaaactgctttgaggaactttgaaattattggtttttaaatagtaaaaagggctcagtcctatctaatacagaactgaaccctttcctataacaatttgtctatcctgttgggataagtgcctgagggggataatattcctatacgggaatggtggcactttccctacaaaagaccaaatttacttaggctaatccatgaacataagcatctacagcaacgatggcttgcgcaatatcagaggctttcacttcaaatggcatttgatggatagtttctccttcaatagtcgcttgttgaccaaccttgagaagatcttcatagcttgcattttcaagatgcatttctttaagagtagttggcatgccaatttgttgatagaagcgaatgtatttatccaaaacttcttttggacgattttctaagaacaattgcacaagagttccgtaggctactttttcaccatgagtcaaatggtgaatatcgccagtgagagctgtgaaaccattatggatggcatgagcagcagccaaaccaccactttcaaatccaataccactaagaagggtattagcttcaataatattttctagggcaggcgttaccactttagcttcacaagcggccatggcttgtagaccatctgcaaaaagaatctcttcacagcgttcagcaatggcaacccctgctagagtttggtgtttacctagcatagtttttccgttggcttgcataactgctcgagcttctacccaagttgctaagccatctgcaataccagatgctaacaaacgttttggtgcttgagagatcactttactatccaccaaaaccaactctgggttcttagaatagaagatatagcgctcaaaggcaccctcgtcagtatagataacagacaaagctgaaactggagcatctgtagatgcgatagttggggcaataacaactgacgattgtagaaggtctgcaatagctttagcactatcgatagtcttaccaccaccgagtccaataactaaatcacagtcttcttctttggctaggctgaccacacgattaatttcattatccgatgcttctccattaaagaagactggtacaactgtgagtccattttgaacaaggtattcttcgaaacgtttacctacaatatcataaactactgagtcacatagtaaaacaggatgagttcccaattctgaaatggcttttgcattttcaaataaggcattttcaccttgaatgtaacgtgacggacttgcaaaatttctcatgtctttctcctttgacataaatgtatttatatagaatcggttaaatggacctattcctatcttatgcagggctaaatccttttaagagactgtctatcttttgtagtcagtacattatactggtcttgtttatcatctaatcgctactcttcttctgggtagaccaagccccagtctttgcggagttgagtcataagttccatgacatctcggctgtaattgaggtaggtatgatcatcctcgcctgcaacagctgcttccatgtctaggacttcatactggagggctttggcggtttctccggcctcgatgacttcttgtgagccatcttctgtataggtgatgactgccttttgcccacgtgggtattcgtaaagttcgatataccccttatcataagagatagtgccacgtttaggttgtttagcatgaagactcaatgtcaccgtcgccatctccccttctgcattggtaaggagaatacccgcttgctcatcaacaccagtgggagctaatttaacctgtgaaaccatctctgtcggttgtgaggtcataaaccaacgcacgaaggatagggcatagacaccgatatcaagtagggcaccaccagctagattacgattgaaaaagcggttggtcatgtcatattctttataagaaccgaagttcatctgaataactttaaggggacctagcttaccactttccacgatttcagatagttttcgatagataggcatatggaaaatggtcatggcttctgccagtttgacatgattttcttcggcgagttggatagcttctgccaattcctcactatttaaggtgatagatttttcacagaggacgtgtttacctgctgcaagtgccttgcgaagaaaattgatatgcgtattgtgaggcgttgaaatgtagataatatccacttcaggatctttaaacacttcatcaatctctttataaaccttttcaataccatatgtctcagcaaaggccactcccttatcataggtacgatttgcaacggaatagagtttaccacctagagcctctaaagcctgtgccaactcattggcaataacgccagttccaagactagcccatttatacttaatttgatttgtcatagttttcctttattctatttttgaatggttaattcatttatctgtgataagatttcaacttcactcgctcctgcctgaagcaaggctgatgccgcataggccccctcaatgagaggtacctgctgaataaggatttccttgtctgaaaattcctcaagcatttccaaattcatacgagcactgcccagatcataaaaggccaagagacgtttagcaggttgactatccactgctacttgaacatggtcaaaactagatcccagtccaccatcttcaagaccgcctgtagccgttaaaggaatatctggtgcaacttcacgaatcagactcaccagacctttagcgatatcagcagagtgggatacaatcacaattccaagttctggcatgtcctattcctccgcttctagcaaggctttgaagagtagaccagacgaatacgaacctggatcaatgtgaccaattgaacgctcaccaacataagaggcacgccccttggtagccgcaacttccttggttgaaagaacagctcggtcaataaggtcattggttaattgaccttgtttgacagcttcaacaactgggtgccaaacatccaccatggtcttttcaccaacttgtgcatgaccacgttttttaatcatctcgagacctgcctcaagcactcctgccaaatcttgaccagcttgttcagccttcatcatgcccataaaggcagacccataaagcggacctgaagcaccaccaaccttactaatcaaggccatagacaccgccttaaaaacttcggctgcactttggggttcagtgctcttaatagcctcaatggctgctgccataccacgcgccaagttagcaccatgatcaccatcgccaataggagtatctaattcagacaagtggtctttttctgcttcaactttttggtcaaagtcttgcatccattttactgcaactgttttatccataatatacctaatttctagttctcacgtcagactaccaagcaatagtcttaactggactctccaaagcctcaagccaagcctcatcttcaatcttcatcagagtcaatgagaggcctgccatatcaatagatgtcatgtaattacctaactttttatatgccacatctagtccggcatcttcaagaatgcttgctacatcattagcaaagacatactgctccatgagaggtgtcgcacccataccattgatgagaagggcatagcgttcacctgacttagcatcaaaagcttcaaggagcttaccagtcaattcttcagctaactgtcgagaaggttgcatagactccttgcgatagcctggttcaccatggataccaataccgtactctatttcatcctctgctaggacaaaaccaggcttgccgacctcaggaactgtcgcaccgctaagggccaaaccaatagtgtggatattaggaacaatcttgtcagccaagtctttgatttcagccagagacttaccttcgcgagccgcatgacctaggatcttatgcacgaaaatggtacctgcaaccccacgacgaccttgagtatagaggctattttccacagcaatatcatcgtccacaacgacactggcaacctcgataccttccatctcagccaattcttgagccatctcaaaattcatgatgtccccagaataatttttaacaaccatgaagacaccagccccttgatctgcttccttgatagcttccaaaatttgatcaggtgttggtgatgtgaacactgcacctgcgatggctgctgaaagcataccatcacccacaaaaccagcgtgggctggctcatgaccacttccaccaccagaaatgagaccaacttgaccagcagcctgctcatttcttacaatgatgtcaaagccgtcaacacgatgcaccaaatcactgtgaacataagccaaaccatctagcatctctgtcacaacattttcaggtttattgataatttttttcatgaaattgtctccttttcaaaggtatcatctatttgcacttacatttgttcccttctttaattgctaagacccctataaataaaggactgcaaggctttttgagaaaggtagcgtaaaaatatgtaaacgcatacattttataatttaattgtagcatttgcctctaccaatagcaaggcaaaaggcaagccctccattttcctgccccctatcattaagtagaagaaaaatctcatagaaagtcctattttagtcgtcaaagctattgaaaaaccaccattcaagccttataatggaatgacgaattaagtgataaggaggttcaaatgaccatcgattttccaagagagacagaaatagaaaccaaaaatgaaatggatgccgtccttcaggcaggccgtgtccttatggagagcggtgccgagatttaccgtatcgaagacaccatggggcatatggccaagtctcttggtatcagagacttctccacttacgtggtcaatcgaggagtcatgatttctggactcaaccgctcaggtcttaaagagtctcgtgtcctagctacctcagtcccgtctatccatctaggtaaactagaggaagtaaaccgcctgtctcgtgaactggcagaacagccaaatcagcctgtttctagcattttccaaaagctgaaaaccattgagcagaagactttctatcgtcctttagaggatattatagcctgtgtcattggtgcagggagcttctcgctagctcttggaagtagctggattgatgggactgctgcggctatatcggggctttttgtggggattggtatgcaactcttttcccgttttattcataccagtttcttgcagattatcctctctagtgccattgccgctttatcagctaatattctctattatttgggtatcgggcaacatcgtagcgtgattattctgggcaccttgatgattttgattcctggggcctactttgtaaatgccattcgagaattcacccagaacaactactatagcggtctagcactgatgttgtcaggggtctccacttgtctatctatctctgtcggtgttcttgccatgatttccattcttccctttgcggaacagttatcaggtatgttctcaacaccgtcaacctcatggctgggggtcttgattcagaccttcatggcaggactagggacagcagccttctccgtgctttaccgagtgcctaagaaatacttcctagaccttgggaccctaggtgccggctcatggctcctctacctcttgatttggaataatacccatcacgaggtcctcgccatcctcttcccagccctattagtcactatcacctcacgctttttggcccactaccgtagatgtccagctacagtcttcctagcctcaagcatgttcccactcatcccagggatgagcttctaccgtgctgtctacttcctcttgatcggaaatgcagacctcggcctcagcttcctacgagcttgtttcctggcctcctttaccatcgccatcgccgtcagtttgacacaacaaatccctagccgctattttgtactagggaagaagaaataaattgttaaaagccattggttttgtatgccagtggcttttttggtggcgttctaaaatcagtggatagcatattatgaatatcaaaaataccctactcaaggatctatccgctgctaacttaaagcaaatacatcattaactctctttaatgaaagtttatcattcatatactatcagttttgtttagagtagagttggaaagagtttatacaaaaataaaaacgcttacacaattctttgattttattaaaatgtgatgataaacttgatatgtaagtaatagaaccataatactaacttaattttactcatgagttaaccatatccttgctactattatttagttttatgaaaggagcattatcatggaaaagaaagtatactttaaacttcacaaagtaaaaaagcaatgggtaaccattgcagtaactggtctagctctaggacttagttttgcaagcttgggctatgtgtccgcagctgaacagactcactccacctcagaaccaacggttgaaaacagcatagaagaaaatgcaatcgatgtcataagcccgtcaactaatgaagtcactactaaaccagaggaaaacaaatctttagtcacaacaaattcaagtgaaatcatcactgaaactacttctactgaatctaaacaaagtgtcactgatgcagctacttcagacataggtacttctgaaattaactctcaacaagctcttcgttcggaagtctctactgttactagcagtgaagtcgtaagctctgaaacatcacattctgaaacaaatgcagcccatgaagtagaagaaagtcccgtaatatccggcggtcattacactagcgatgatcagggcaactggtactatattaaggatgggaaagcacttactggtatgcaaaatattgataatgtgaatgtctacttcgatgccgatggtaagcaagtcaaaggagacacccgtcacgttaatggatcaacatatcactttgagaaagatagtggacaacttacccgtagtgcttttgcatctgataagaatggaaattggtactatttaggccaagatgggaaagcacttatcggtaaacaagttattgacaatataccactctacttttaccctaatggtgtccaagctaaagatgcctttgtcgtactagatggaaattcctattattttcaaaaagatactggccaattggttcgtgaccgtttttggtcggatgacgacggcaactggtactatagtgataaagaagggaaacttctaacaggcgaacagactatagatggcttcgacatgtatttctacccagacggtgttcaggccaagggtgaaatcgttacaataggtatcgaaccctattactttgataaggatagtggtcataaggttataaataccgacatcactattaatggaaaaacttaccacgcagaagctaatggtcttttgattgaaactgaacagaaacttcctcaacgtccacttgtttctggtggccatttccaagaagattcctcaggcaactggtactattacaccgcaacaggagagaaactaaaaggatggcaaaatgtagatggagtaactctttactttgacgaagaaggtcgtcaagcgaaagatggggaaagaatcattgacggctcccattactattttagtcactattcaggtgctgtaaaaaccaactattggcatacttggtctattgaaatcagaagacaggaaccatttgctaaaacgtattacgaatattatggttctgatggtcgacgttactatggatggcatcgagttggcgatcaactttattattttgatcatactggtcgagttgaaaatggtcttactatcttcaaaggacaaaactacctctttgataatcatggaaaattggtaaaagatgccttttatattcagtcattacgtgtctttgttggaactttaaatactagctatcgctccaataaatttggccaagtactaaccggagaacatcatattaatggtgatgactactatttttcaaattctggttcagcagtcactggtatagtcacaaaaggaggcaaggactattactattttgaaggcaaacttctgaaaaactatctcggacctttactcgtacgtcagaatctggattatgatgcatactactctggcattgtaggtacagataaggatggggttttacttactagtgttagcactgcaaataatggtaaactctattattttgaaaataatagaaatatccccaaaatggttacagttacaacacctacttggaaaacgattgatggtaagctataccacttagagcctagcataaacagaacttacaagcatggtggaagaagttataccaaaaccgtcagggaagaagtagacattattaaccacggagtacgaacaaagaccgataagattaaacgtattattggtgatgattttagtaatctatactatcttgatgaaaacaatgatttttacatcggacatctacttccagaaaacacagatttaactaaaattgaagaaactgtaattcaaagtgacaataaattctatgctttcaatagaacaagttcgctttccgaaacttcccctctcacagtttccaagaccttagtttacaataaaaaagcctacctcattgatgataaaggagtagcgaccgaaactaaactaacaaatcgtttcgaacacgatgatgcatggaattggtactactttgataacgagggaaaagctgtcaccggactccattcaatagataatgtcactctatactttgataaagagggcaaacaagctaagggaagacttgtcgaaattgacggtcaaacacattatttcgatagagacagcggagctatgtggactaaccgaacacttgaacttaatggtattcgttatatcattgaccaaaatggttatgtaactatgaataaacctggacaatttattcaagataaagatggtgattgggcttatattaaagaaaatggacaggtagccactggacttcagattattaatcatcaaaaatactactttgatccaactggaaaacaagccaaaggaaaacaacttctgcttgatggaaagtactatttcttcgatgaagatactggtgctatgttcgtaaataaattccatgaaacaggcgattacttttctaaaaaatatacttattttggcgaggatggaagccagatatttggttgggcaactattgaaggtaaacgtgtttattttaaagaagatggctaccaagttcgaaatgatagacacaagataggtgatttcgattatttcttcaaaaaagacggtagtatgctttctgatgatattgacggcaactacaaatactattatgctgataaagacggtcatctacagttcggatgggttactcataataatgaaacctactacattagcccaccatggggagctgaaaaccgaacatatctacaaaatatcaatggaaagacctatcttttgggccctaaaggacgacttctaaggaatacagctacagacatctcttgggataatttctgtgtttctgatgaaaatggagttgtaaaaacaggtgtcattcggttagaagataataggctctattatttcaatcctgaaatttatatgactactccttttagtggcgaatgggcagagtttgatggtaaactttatcattttgaaatgccgatatcagttagtccatactcaaaaggttctccaattaccactaacactacgcttgaaaaagatggaaaaacctatattattgacgaaaatggcgtagctacagagaaaaaggattaacatcaaactaacaactgtaagcatttgaaaaatacctcatttttgccaaaatgtattcaaaaacaccagaaatcaatttttctggtgttttctttttattttctaaaacatagtaaagctacctgacagaatctctttcatcaatctacttcaaatcaaaatattccttaacatctttagcatagccatactgctggtttaaacgctcgattaagtctttgttatgccctggataattgtcatttctcaccatcaccctcatacaaagattccaccaaacgttcaaagggttctatatgctcccaatactcaaaaggaagatttgaaatcttacttaaatcattatcatcaaaatgatacacgagatggcgtagtatttgattttcaatataatggatatctctcagctcctcgagactgattgtatccagttctatgatgtagtgacacaaatcatcaagtgcctttacgtcaaattgtttctcctcgtgtaggaagtagagaaagctctgattctcacctcttttattatcttctatcagattccttttatgcttcattcttgaatcctttccttaatagcaccattataacactagaaaatgattccccaaaacgacaacataaaaagagaacctgggatgtttccattccaaattctcttcttgttgatttacaaaatagcaacacatcttaccacaaactaatgcgtttgcttggtgccaagtacatgtcatccccttctttgatttgagggtaggtctcatagaactcaggaaggtttttaagttgttggttaacacgtagctcatttggtgcgtggacgtcttgcaccatggtatattttttgtactgtaggctagccttttgtttccagatatctgcgtagttctcaaagtaatccttgaggttaggttttgtcatatctgttttgagaacttgtagtgtggatgagagaccaccagcatctgcgacattctcagtgactgtgagttttccatttaccttagtcccgtaaatttccaaaccattccactggtcttcaaaggctttgatcctcttgtcgaaagctttagtatctgcttttgtccaccagttatgcatgtcaccattctcatcataatcggctccattggagtcaaaggcatgggtaatttcatgtccaatcacgacaccgataccaccatagttcttttcagtactttggtttttgtcataaaacggagcttgcaaaataccagccgggaagttgatactgttactttctgggttgtaataggcattgatatcaaaagcagaaccagaccatttattcttatcaataggatcatcaaaatgatcaatggtataacgttttccgaactgggcaatatcttctgacagttcaaagaaggacttgttagggtcaagatgtagttccttagtaccaggatcgacatcttcctgataacctacgaaaaccttcattttatccaacttttcgatggccttgttgcgtgtaccttccgtcaaccaattattcttttggagacggccacgatagacatttttgattttatcaatcatacctgtcacatcagtcttggcttcttcaccaaagtatttacgtccataatagacactcatgacatcgctaaacagattgacactcatctcatagactgtatcttctttagaaattggcttttgtgtgcccataatagccatgctaatcgatgcaaaattcaaacggtaatcttctgtcaaagaatttgacgctgccatagcttcttgcactaatatccatgattttattttagaaaaattgtcctgattaacgatcttactatagttctcaaaatacttggtattaggaacattgatagtatttaaatcacggcccatgatacctttgatgacatcatataatttgaaggaaccagagtagtcattaatctcttctgctgttttagggtgaaccaaattcttactttcagatatctcttcgttactgagactgtacttagcaatgatttcgtcgaactccagtgcttccttgacaatccgtttactatttttttcactatatccaagcatttccaacgctttttgcgtggctgtttcaattggagtcaaatattgtttcttgctggcctcgtctttataaatagacacatctggcaataagatacttgggggactcaattggatttgtttttggctggtattctctgcgttagttcctacgtcataaccaaatggaagaggaatccctttatcagtcaagctagcagatttactggccaaatcatttacatccttgatatcctcaatttcttttagataaggtttgagaggttcaagtccatctttctcacgttgcttgtaattactagcagccttgtagaaggtgataaactcagacattcccgtaatatctgacgtttccttgccctcccctaaatttttgatatccttctttagcttgcctttgatatcttcatctagagtataaaaattatcaatgcttggagaatcagcaggaattttggcttttaggagccagtccttgttaacagcttgataaaaattagaagctaccgtagcattcttatcaattggcgtttcttgcggaacaaaggttttataagcccaaaaaccgcctccagcaagagctaaggccaaagctcccgttatggagccaagaataattttcttacgctttttcataaatactcctcataaaattaaattaatatatttgtattatatcattagaacacttattttagcaagctgtttttgggagacaaaaagaagtaatcagacgattacttctttttattttcttaaatagcgaaaattaggtattacgacaccaaagataagaacaataaaagatcaactaaatccaacttaatgggtttagttgatcttttttgtcattttactaatcatcacaagcagataaatcatttaaaagacaaactgccgagtgatgttaatcctcttgctagattaaagttacgctctgatttttcttggaattctgtgagcgtcttactcaagtcactcactccagaactcagtgatttgcctttagaaagattgcggactgctagaacttgaatagctctacataattctgctagaagttcatcattatccttcttcccaacttctatttcatttttaaacttgacaagcaactctctctcattttcagttgtttctggatttacaatcagattatagatattgtttaagatatccgtaatttgcgtgttattgctttttgtcatctagattacctcctataacctgtagcaagattaggtcgagcaagtgaattaaattggttaattgtttgtgttgtcataagcaacgacctcttttgatagttcgctatgacatcattatacacatctagcatattaaattcaagaacaaaaatatccttctgccacgaatgcacgaacggacaaaaagaagtaatcagacgattacttctctttattttcttaaacagcgaaaattgggtaacaagatactcaagataagaactataaaaatgcctaaaatcataattgtagtatagggattaaagcagagacttattagcaagacaagactcatcgcaaccattaggtatcccaactttctcactactgatttactgctctggttatgattttttgtagccagacctattcttttaggaagataatttccaatcactagaaaaatgagtgccactaaccaaatcacagtcaagcgaacttgaacatggcctcctaaggcaacaatcaatataagaccttgaataagcacagcagaaattgggaccaaccatagcataaactcttttaagaatgggatcgttatttgtttaaagaatgaaaaacagagattatatatgattaacgcaagaaaaggaagtgcaacaattgctaaattgcgattcataaaaccattggcttgctcttccacattaaagtggattgcaatctgatttggtagttgtttgtaaaagactagtccgacaataaccggtgtaagtatcactatattaccaatgactctttgcatattatttttcatcttcttttcctccaagtgattgaatccaagttaaaatttcttcaaaaacggtcaagttcaaactgtagtagataaaattcttctgtttttcttcttcaataagtcctgcttttttcaaggtagacaaatgatgggaaactgttgcaggagccaagtcaaactgctggctgatttcaccagcagacttgggcccagactttagatagtctaaaatttctctcctcacaggggcagagatggcttttaaggtttcagataagcccatgagtttcctcctttttccaaatttggcttgtcacaagtccgacacctagcatataaatagctaacatgacttcgattaataagatatttctgactatcccttgttgataagcacctgccaaaaaatcgatggtagcatgaagtaatatcgccccaaaatagaatgaaagcttttgcttagtgactgctagaaaatcccaagctgtaagcaagacatgtaaaaccaaggcaactagtctttcaaagagagacataaccactgcaaatccagttagttggttgacctgactcacaagaagtggcggcaattgactggtctgacctgaatgaatggcctgtaaagcaatgatgtaagtgaataaccccatcactccaagcaaaataaattcactaagtccatgtccaaaaccgtaggcaacaatatcagatgtcatcaaccttcttttcttagcaaggaccttaaacaccacatagcgtgttgtttcttcgacaaggccagccataagtcctccataaataatggtcaaccatttagaagagtgagcaagaccagaaacagccacagcattgataggtccttcaatcatcatgacaggtaaggcaaaaccaatcagacctactaaaaagagcttgattgaaaattgccattttttcttcagaacgataaaacttatgatggcgataactaacatggcaagaattgtcataaaaaggaatgtttccatttgatttatcctttccttgatacggagcatcagtacgacttaagtcataatacctatttctatacttttcgaaatagattctacgcttttctgaaagcactgtcaatagtatttcgaagaaaatcgaaataggagtacaaaaaaagaccgttttcacgatctttcttcttgagaattttccctcattctcggctgtgtgttctctagtcagtcacatgggctactactgcttatcttcctgggacatattcgccagtgttagcatcgtagtaacggcgttggccgttgactgtgacgtaggcgcctttaacttggcgacctgattggtcaaagtaaaggtgttggccattgatgacttgttcgcctgttacggcatagccatcagctccgaaataagcccagacgttaggctcgatttgagcgaagcggttggttacaggttggccatcgttttcgtcatagtacttgtaacgactaccgaccttaacagctttgcccttgtattggataccattttggtcaaagtagtattccttgccattgatagtccacttgcctttaagggcttggccatcagtattgaagtaagaccattggtttggtgcaatctcagcaaagctgcttgttacaagagctccactgtgggcatcatagtaataagtcttaccatcttcgacaatggttttacccttaacttggataccatttttatcaaagtacttaaggtatccatgatcagcacgaacttggccgatagccagtgaaccatcgtgtttgaagtacatccactggtcatcacctacttggagatagcgtccgctagcaagaatacctgattctggctcataataatatttgatgccattttcttcgataatttcacccttagcttggctaccatcttccttgaagtaataaaggtgaccatcaatgtattgacgtcctgtaacacggttaccttctttatcaaagtaattccaagccttagttgctggattatagacaaagatgctgcgtccgatttcgcctgctggtgtgatgtagcgagccttaccattttcaaagataatagaatctgcacgattgctgtaggccgtaccgacgctaccatcttggttaaagtaataagtcttaccatcaatgacacgtgaaccagtcacagtattaccgtcagcgtcaaagtaataacgtttacctgtgctgctgtctgtcgcaaagacgttacgtcccatatcaccagtttcagcaacatagtaatgcaatttgccatcatctgtacggacaatgcgatccttagcctgaataccagtttcacggtcaaagtagaaatggtggccactccaatgaaggttacctactaccattgttccttgagtcgtaaaggcacgaacctgcttatgtttgtcatcaaaatcaacgaaggcattcttaaccatggcaccgtctagaccgtaatagtaggtatagccgttgctagcacgacgaagggcgttacgcaattggataccattgtcaaagaaatagtaatccttgttattgatgtttcgagcacccttggtcatcttaccgtcaccaccgaagtaataccagttaccgttaccatcttgaacaaattcattcttaacggtttggttatcacgaaggaagtaaacgtcttgtccacgacgttggaagacttgagtgcttgtgatggcacctgtgtcacgaagtggtgttggcaagagttggccgttggctgaggtattaaagtactggttggtcttgtcatcacgaaggacatagttgatacctcgtccaaggatattggttccattgaagtacttagcagaccatttggtaatcttttcattcgtaggcaactgcttaccatttgagatttgcacacggttgaaaatagatgggtacttagctttaagctcatcaaggaaggcaccaccatatttaccttgatagtctgtaccatctgtacgggtatttgccacataggcttggtccacaatttgataaccttgttggtgataaccgtagccgttaacacgtgtggcattaactacttcttttcctggaaggttataaatttggtctggcacccagtcagcaatggcttgaataccatctttgtggagggcacgaaggacattaaggaggtcctcaagtgagccatacttgttattttgactcaaggccatgtcataacggtcatcaaaggcataaccattgtcaattgttgaatcaaggaaggtaccatccttacttgaaacgtactgtggtggaagtccaacagacgtaacaccccaagctttgagcaaattagtgttcttagccaagacacggttcatgtagagttctggctgattgtccgcaaaagcttggaagtttgagaaggcttcatacataacttgcgaatcaagggctgctgaagacttgtaaacttgaccatcgctattggcacggttacttggctgtgtacgtgcgtcttggttagccttagccccgactggtacccagacaccgagataacctgatacttgcacattttccacaccaaaaatatcgttggcattgaaggtcaagttcccattccagtcggtacgtttaagaaggtttttaggcacatcagaatcgttgaggtaggttgctataccatcttttgttgtcaaaagtaatgggcgataaagctgattacggtgagctctacccatgttcatcgttacagtttcattgctacccaatcggaaatcatagttgttggtcatgatgacacccatcccttgcgtacgggtttcagcagttccccaatcagttctgttattggcacctttaccataacgaactgatgtcaagaggccgtcatttccgactttcttcacttccatgtcttgaccgccagctacatacttgatacgggcacgcaagagggtgtcgatagcatcaaagtaaggcgtctttttcgccatgtagtgaccatcctcacggtagaggtccccgtaataaacacgtgttacagagtccttgttggtcaacatgagggcataaacagatggcaagttgtatgacgcataagtcttgtgagccttatcaatatcctcattgtaaatctcgaaggctttcttgatctcatcacgtgtgaaattgtaaccaaacaaatttgggttaatacgatcacggatgatacgttgaataatggtttgggcttccgtatcgtgggcacgagtgaaaatatagttagccatacgttcaccgtttttatcgttgacaccacgtggattcaaactgctattgatgaaagcagtcatgtccccaagctgcatacgtgtatttttatcacgcatcaaaaggttggtaagggcattacggagggcattgtcaatcggaagttgtgctcccttagtgtccttgttgtagtatggatcgttggcagaccaagcttccaagtatgacaagtgcttgatggcattggcttcagacttgtcaacaccataggctgctttgaagtaatctgaagcaatttggagaaggtcagcatccacattgtccaaggcatcgacacgcaaaccgtcaaagttagctgttgggtcattggccatgatacttccgatattcatcataaagtggagccagttaagttgttctgcctgaacagctgggtttgagttatcaatatcgttggcaagcaagaactcaagaccaccgatagaattgtccttgaagtacttacgtgtacccgtttggttagtcggtgtgcggtttaacaaacgatagtcagagttggcgtggctggtacggttgccagtatcacccttactgttgttaaagagcaactgtccgccttgcaagtggtcgtatgaactattttcagtgctactattccaacctggctgagtcttgataaactggtcgatacttgtacgcaaccagttggtattgccctcacgcgcaatacgttcttcaatcttagtctgaaccgctttagcagcttggtctagactttcctggctagagtttgttgaaaatgagcctgcaccaagaccttgattttgcatgtagttaaggtagttaacctgagttgacttgtcaggccaccaaaccatcaatagaggacgtttgtccgcttcagttgaagctgtccaagtcttcccatccttgagaatgctctttggacggtaccaagcatccgctgtgatgaaggtgtcgagttgatccaaagatttgtcatcgtttttatagagctggttaccagatgaaaaatctacggttgccttgataggttctgttgaaaattcatcctgtgacttagtcgcaagagcccctgtttcagcatcaaagtaataagacttaccatcttgctcaaaaacgaagttcttacgcacactaccgtcactattgacatagtattgtttgccgttgatccattggattccagtcgcggtgtttgtgttggcttcacgagtttctgccaaggcacgacgactacgtgtacgagcttctgtatttgctgtatccgttgttgctgcacggtctgtagtggctgttgcagtcgcattatttgtatctgtcgttgtagcactcgtatcagctgcagctgcttgcacatttgtacttggtgcagcttgacctgagttagtatcaactgtcgctgcagttgtagtaggtgccgctgccctatctgtaacatcggttgtcgtgctagtcgcatctgcgacaggaatagccacgctcgcagtattagcatctgctgagatagttggtgctactgtagttgctgcatcattagttgtagctggcgtttcttgaagtagattctgactgctatcacccgactgattggcaggattttgctcatcggcctgaacctgttgatccgccaacaaagttccaccagcaacagtaaccattgagagtgctgtcaccccaatagtcacccaattcttcttcactttatgcagtttaaagcgtactttttgttccataatatttacctttttcccttatattacttctatcataagctatttgacaagggaatacaattacacaactgtaatatcagtttaatgtatctaccttcgttttctcagaaaacgtcctttaataatctgcctaataaatgccccttgtgaacaaatgcactaaggataacataaaaccagctaaaatccttaggatttagacttttttagacgatagaatcatcctacaaaattaatgtaaatttaaataaaaaaaccttcatttctaagatgaaagagaaggtttggttacagggactagcaaaatcctgcgaaagtatgcgtggtttatgggttaggaggtcgcgatgctttccatatttagtagtccacaaaactcttgattgctattttttactcattttccatgtactaccacctagtgaaaaaagcacctatagtttcaataattgcatagagtaatggggattttcgtggtctgaaatctgttttataaaagtaataattcgaaattaaaagaaataatatgacaatgataatccaagccaaaataaccataatttctctcctttaagaagtcagttacacctagagcttaacgaagatggttccccataactacctctaactctattttctacatacaaatataatacccattataacacggctatagctccttcttttgaatatgagagggacaaaattattaggatttaagcatgaaaaagcatctgggtgtacactgacagtttctctaaaacaactcaaaaaaccagcaaacgctggtttttttatctatttaatcatctagagttatgataggaaaataataataatttagataggaaaaggaaaaattcgctctagatttttaaagtacatagtaattagcgacgctgtctcaattcaccagttttggcatcgcagaagaggcgtttcccaccaacatagacataacgccctttaacttgacgacctgaaccgtcaaagtaaagctgtttgccattgatgacctgttttccagtcactgcttgacctgctgcgttgaagtaataccagcagccacgtccagcttcaacaaagcggtttaccacttgctcaccagtgtgggcatcaaagtaacatttcttaccttggacagtgagcaatttacctttgagttgagcaccattgctaccaaagtagtaaactttattgttaatattttgaagacctgtcactttgtgaccatcttggttaaggtaagcccattgattagccgcaatttgaatgaattggttgatgactgcttgaccagtgacggcatcatagtaacgtccttcagcccagccaccttttagctggctatggtctttgttgaagtaatagagtttaccatcaatcactttggcaccttgaacgaggcaaccaaaagcatccgcataataccagttgttgttttcaaagataaagcgtgacacagccatttcacctgtttgggcagaaatgtagtattgcttgttgccttgttgcatcatctgacctttgatttgacggccttctgagtcaaagcagtattctttaccattgatgatacgttttcctgtcacagcgtaaccatgttcatcaaggtagtaccaagcttggttttctttattttgaacaaaggtatttacagccatattaccagtatcagggataaagtaacggatacggccatctgagaagcgaataaatttgtctttagcttggatacctgtttgtgtatcaaagtagaaggttgtgctacccatttcaaggagaccagtagccatgtgaccataacaatcgaaatagcgtacatccttacggtaacctgcaaaatcatagaagccgttgatagctttcacgccatttttatcgtagtaataggtatagccatcactacctttaacaagtgagtcacgagcttgaagaccattttcaaggaagtaataagccttaccatcgataaccttttcgcctttgaccttttgaccatattgatcgtaataataccattgattttcgcctacacggacaaatgaagacttggcattgttcgaatcaacacttggcttagtctcgcctgaaatgatttggtaacctgagttattttgctgatttccttgtgaaatgatagtgacattagcatttgaaccatttgaatgacctactgtcacgtttggaaacagtttatttgaattcgaaacgatagtcacatttggcgttgttcctgaagccgtgatggtgattgtcgtgtttcgaccaccattccaatgaatgccgtttgagtcagacgaacttgtcgtaattgtcgcaaaaccgctagctgacgatgatgaagaccatgaagatgaagacgagtaagaataccaagctgaacttgatgagcttgacgaacttgacgcactagcacttactgatgccgaactgctacttgattggtaagcagaacccgtttgtgatgaattagaggtttgtgttcctactacttgagaagattgtgacgaactcacttgaccagatccaccacctaccacagtctgtgatgagcctcctgttgaggcagatgatgaagactcgtagcttgagtttgtttgactgccatagttagatgacaccgctgacaaatggccagcatcttccgtcaaggttggcgaatagctttcattaatcaatgaagcacttgactcaatgcctgcatctgtttgttcaaaaccgtcaccattaggaagtgacacttcatctgcttgtgccgattggtccgctaaaagggctccacccgcaagtgcaaccatcgacagcgtactaactccaatagtcacccagtttttcttgaccttgtgcaacttaaatccaactttcttttccataacatacacctttcaatataactttatttctctatactatgttaagggattttggaagcgaatacaattacagatgcataaccctagtctcataagactaaccttctacccataatccatttgaagaaacaagcctaagatatatacctataacctttatatgttagaaaacgttaccaaaagaacgtttggattttgttaactttacacagaaattccgatgtttagccgttttagctcccccttcattagaggactgagtatagtttaaaacgaaagtaagcaatttattgacgattctattaatcaaactcattgtttgcttacaatccactagacatttcgagggaaaatgataaaagaaaagtacttgaaggaaaatacttcaagtacttaaaagttttgaaattatgtggaaagctactgattttcaatctataagcttctgggatagtctccaaaatacatttttcctgcctaattatcgttttctgacccaagctccagtattggcgtcatagtaacggcgttggcctttaacccagacgtaacggcctttgacctgacgaccagaagcgtcgaagtagaggtgttggccgttgatgacttgttcacctgttacggcttggcctgaggcgttaaagtaataccaaacaccgcgagaaatttggatgaagcgattggttacagcttcaccactattggcatcaaagtagtatttcttacctctgtaagtcagaagtttccctttagcttggacaccattgccttcaaagtagtaaagtttaccattgatatgctggagaccaactaccttttgaccattttggttgaggtaagcccatttgttggcaccaacttggacaaagcggttggttacggcctgacctgagtcaccatcatagtaacggccgctggcccaggcacccttgacttggctataatcattgttgaaataatagtgattaccattaatgacttgagcacctttaaccaacttaccattgccatcgacatagtaccacttattgttttccgtcacaaagcgtgaacgggcaatttcaccactatcgccatcaaggaagtaacgttggttattgatagtgacaaagtgtcctttaacctgacggccttcattgtcaaagtaatactgtttaccgttaatggtttggaggcctgtcacggcataaccgttgctatcgaggtaataccaagccttgttctcaggattttgcgcaaatcggttgactgcgagatttcctgtatctgggatgaagtaacgcgtgcgtccgtccgcaaaacggatgaacttgtctttggcttgaataccagtcttttcatcgaaatagaaggttgtgccatacatgtcgtggaggccacgatacatttgaccgttgccatcgaaatagcgaacgtcttggcgaggacccgcaaagtcatagaatccgttaaaggcctgaacccctttaggatcgtagtaatagacgtgaccatcactaccttggcgaaggacatgacgtagctggagaccattgtctaggaagaagtatttcttgccatcaatgacctgctcacctgtgaccatgttgccgtttttatcaaagtaataccactggttggcaccgacttgaatgaaggtgttcttggcaaggtagccactcgttgagaagtattggaccttatctcccaccctacggaaaccagttgctgtgatttcagtcatttgtttaggaaggaaggtttgacctgccttaaggctgaagtattggtttgtagcgttatcttgtaggacatagcgagctccagtaccttggatattgcttccattgaaatacttggctgaccattgcgtgattttctcattggtagtcaatttacggccgtttgaaatctgcacgcgctcaaagattgcagggtattttgccttcaattcatcaaggaaggcaccaccgtacttgccttggaagtcatttccaaaggtacgtgttttagctgcgtagaggctattgtagatttcagcatttgggcgtggtgtaccgtagctattggtacgagaagctgttaccacttcttttccaggaagattgtaaatttggtctggaacccagtcagcaatggctgagataccttctgcgtgaagggcacgaagggcatccatgaggtctttgagcgaaccatatttgttgttcttgctcatggcaatatcgtaacggtcctcaaaggcataaccattttcaatgatagaatccaagaaagtgccgtcctgactagacacgtattgtggcgcaaattcaaaggaagtaattccccactctttgaagagtttggcgttttgtgcaataacatggttggtgtattgacttggtgtcttaacgaaatcttggaagtttgagaatccttcatagataacctgtgagtcgagagcttctgaggattcaaagacctgctcacccttcttagtcgtcgaagccttggtgcgggcatcttggttttctgaagcacctactggcacccaaaccgctaaatagcctgaaacttcaacggttgaatgaccagtaatatcatctgccgtgaaggtcaagttcccttgattgtccgtatagcgaaccaatccagctggcacatcagcatccttaaggtaggtcgcaaggcccgtagatttgctgagaagtaatggacgataggcttgatttttatgggcagctcccatattgactaccaaacgatcatttgctcccaacttcatatctgtacgattagctgttaggactagcattccttggttacgtgtttcagcagtaccaagttgattagcttcttctgcacccttaccataacgcacagatgacatgatttcatagccattgagcttagtgaccttcatgtcttgaccacctgctacatatttgatgcgagcacggagcagggcatcgatggcattatagtatggtgatttttgagccatgtattggccatcgtcggtaaagaggtccccgtagtaaacacgagtgatactgtccttgttggtcaacattgtggcataggcagctggaatattgtactgggtgtactttttatcagccttacgcatgtccgcattgtagatttcgaaggcctttttgagctcatccatagtgaaggtgaaaccatctgtttttggattaatctgcttgctgatgatattggccaaaacagcttgcacttcactatcatgggcacgcacgaaaatataattggcatcacgtggcgtgtgtttctgctcacttgaacggttgttaagagagttagtaatgacacgttccaagctaccacggtaattgctcttacgtaagaaagtcgtcaaaagcgtctcacgtagaggattgtcaatggacaactgggcacccttggtatccttgttgtattgatggtcgttgtaagaccaagcttcaaggattgacaagtgggcaatagcgttggcctcattatcagccacacggtatttttccttgaagtaatcagaagcaatctgcaagagatccgcatccacattgtctaccgcatcgatacgaacaccgtcaaagttggcacttgaatcattgccaaggatagaaccaatgttcatgatgtagtggagccagtttagttgctcggcctgaacagctgggttagagttgtcgatatcgttagccaagagcaactcgtaaccaccatttgaacggtcaatatggtatttgcgtgtccccgtttggttagtcggtgtgcggttcatgagacggaaatctgaattggcatgactggtcgcactattattgaggaaggtcagagctcctccttgcaagtggtccttaccaactaagagattgtcctcactctcagagttccagccaggctgtgttttgatgaagtctgacatcaactgtcgaagccaagtggtattgccttcacgaccgatacgttcctcgatgcctcgttgaaccgtttcggcagcggctgccaagtcatagctcatcatgtcggtcgtataggtcttattaccaaacccttgttgactcatatagttgaggtagttgacttgtgtcaccttgtctggccaccaagtcatcaaaaggggacgataatctttctcagttgaaggtgtccaattttttccatccttcaatatctgttttggacggtaccaactatcagctgtcaagaaattgcccaagtgttcaaaactcttgcttgacgtgtcgtaggcctggttataaaccgcatagatagagttatttggaatggcatcggcacgatacaaaggtttactttgatccaccatagccccagtctcatcgaaataataaagacgaccatcaagttcaatcgctgtgttctttttcacaacgccattttcaacataatactgcttgccatcgatagtcttcaaatttgaagctactggtttatagtcaagacttggctgacttggttgaacaggtttgtttggttgagacggttgacttggttgaacaggtttgtttggttgatttggctgcgttacaatagtcacatttggtcttgtgccatttggacttgtcaccgtcacgtttggcttaggcgtgtttggccctgtgataatggttacatttggtgtcgtaccgctggccgtaatcgtgatgttagtgttgcggttggcattgatacgaatagtgctgtcagcagcgcgtgtggcgattgctggtgctgcattggtcaagactctaggtcttgcttgttcggtcacacttggagtagactgagcacttgtttgcccagctacttgagttgatgtctgaccttgtgaggcttgttccgtagtctgtgtctcttgagcactagcttgagtttgcgaagaaactgccacttcttgactggcaactggactagtttgtgcttggacagttgtctcttgaatgactgcacttgtcgccgcctggaagcttgtttcgtgacttacgctggctgttgctactgctgacacacttgcttgagcactagcttgctcagtaacagttgttgtcgtcactagactggcagtcccatcctcactcagttgctgcaagccatcaccatttggcgtgcttgtctcatcggcctctaccttaccttgagctaggaggcttccgcctgccaaggcaaccattgagagagtggtcaccccgatagttacccagtttttcttaaccttgtgtagtttaaaacgtaccttattttccatctatatcaatcatcctttttctgttgttgactctactctatgatatattcagacaaattacaaataggaaaaagtcatcttcttttcataaatctctgccacaagctcggttatattaactttgattagcgaaaatgagaccttacacaacatgtaaggtcttaaatagaaagtttttgattctaaaacaccttcaaatacttatccttaatggcttttgaacattaaagcaagcttcaattaaccttaagagatagcaaagctatgagagaagcagaccctaaaaagacaattctgaaaagaaaattttagatagaaagactctattttttcatctgactaagatcgtggtctgtctatgaggaacaaaaattaaaaatataaatgatttacacaggtgaattcttatttgactaacgaaactaaatatagaatcttttatgtcagttctttaacatttttgataattccgttagtttctgttgtttattcttaaaaaaggattataatgaagctaggtgaacatgtaagcgttttaattttgctttaaaggacacttgggggattatctaaaagattgacattagttacctaatgcctgaataaggattatagtaggataaccattcctgagtcactttgaaccatcaaactagggctcataaaaagaatacaacatcatttcaaactagagctctagaggggacgcctcatactagtaagctctagttttttgtgtcttagaagcccaaaataaacgagatcttccatgcttagaaaggaggaaaattccgaacggatctcgtttttctagaatcatttcgtcagaactcatgtttgccttgaacagtctcgtaataccgaaattgaggagacttggagaaataaggattgtcataaaaagattaacttacatcgttagggactctacccaatgctcacttttcataaactctcatgacagcccttattttgcagtatgtaaaaagtttaaaatgaaaggagaattaccatggaaaagaaagtacattttaaacttcacaaagttaaaaaacattgggtaactattgcagtgacaggacttgctttgggattgagtttcgcaggactcagctacgcttcagctgaagaacaacctacacctgttaatgaagcaactgttgaagccatcatcaaagaaggcgctgttgacgtcgatgctccaacaagtaatgaagccacagctaaacctacagaaaatacagctactaccgcttcgagcgaagctaccacagtgtcagaaacaccagtcgctaactcagaagtggcttcaacagaaacagtctctgaaaaaccaagctctgaagtcacaagcacagctagttcggaagcagctaattctgaaaccgtgcattctgaggaaagtgcaacgactagcgagagtgttacacctgagaatgtgtcaccaacaactagtaatactgatacccctaattctcaagttccctctgctgaaaataatatcactggcggtcactactacagtgataaacaggggaattggtactatgaagatgctaatgggaaaaaacttactggagatcaaacgattgataacgtaagagtctccttctgggaggacggaaaacaaattaaaggaccacaaatcgtaaatcacaaactataccgttattttgatgataatactggtcaactacaaaccaaacgttatctagaatataagggaaactggtactatgttgacaaggatggtattcctctcaagggggaacaaaccattgataggcaagaagtttattttgattatgacggaactcaagtcaaaggagactttagtgaaaagtattctggtaatcttgataagatgcactattatgaccctaacaccggagctagagttagaaaagaaggtctcgttcaagataaagaaggaagaaccttttttatcaataatgacggttctaaatatacaggaactcgtatgattgatggtaatctttattatttcgaaatcaactctggtgtcatgcaaaaaggaatcagcatagagctagaagatggaaagactcttccaacttctaataaatatggaacgcccacaaacattacccgtcgttactattttgactcagaaaccggtcagttagtcaaaaaacaaacaattaaagaacatgataaatggtactactacggtgatgatggaaatgctattcgtcctaaagatggggaaacccttattaatggacaaatcgtctatctctactcaaacggccgtcaagctaaaggagaacttgttcttgataatggggtcctccgttactatgatcctgattctggagctcgtgttgtaaatacaaacctaacgatcaatgggatgacttataactttgatgaaaatggaattggtaaagatgctccaaaccctaacggctactatagcgatgaacagggtaactggtattataagaatgcaagcggagaaaaccttatcggttcccaaatcattaagggtcaaagagtattcttccgggataatggacaacaagtcaagggggccttaatagatatatataatgaccttaaaggttactacgatgtcaatacaggaaatctcgtaaccaatcgttacgttgaagttaatggtaattggtactatgttgataaattcggcagcccactaaaaggagcctacattattgatggacaagatgttatgttcgatccccataatggtaaacagattaaaggaggatttgtaagagatccgaagtttatctccaaatattattacatgcctaagtactactatgataaagacaatggttgcaaagtaacccatgcaggctttgttaatgaaaatgattcaacctactaccttgatgataaaggacaaatagttcttggacttcaggaaattaatggcgatttctattacttccgtccagaaaatacgtataaacaatatgacattggagaaatgttacgagatcgttttatctatgaaaataataaggtctattatgttgatcatagtggtaaagtcttgaaaaatcgctttttcgaacgtaatggaacttggtattattttacaaaagatggtacagctgcaacaggagaagttgaaattaatggtcaaaaactatactttgataatccttggggttttcagaccaaaggaagggttgctcaaaacggtaaattctatgacaaagattctggtgaactagtgaccaatacttttaaagaagtattgacttccgttggtagtaccataaatggcgaaattttatatgcaaaggactggtattaccttgatagggaaggccgaccactaaaaggacctcaaacacttgattatgtcaaaatgtacttctttcctaatggagcacaggttaagggacgttttgctcctgatggacactactatgataaggatactggtgcacttgtaacaaaccgttacgtccatatctataactggaaatttcaagataaatacggtaatcctgtcgataacttttttatccagtacccacataattttatttttggtctcaatgataacacaataccagtagacattagtcactacccactttcaagcaaagacttcgattgtgaggactatttctactacgttgatgtcaatggtgataaagttaccggtgaacaaaccattgacaatgtcccagtctacttccacagtaacggtaaacaagccaaaggtgaactagtcaccgttgatggtaaaatccactactacgatgccaactcaggtgcccgtttgtcaaatattgacattactattaaagggcaaacctatcactttgatgcggatggaaacggaacactcattagttaatgaagttatagagactccttctcaataacgacagtttaaaatgaaaggagaattatcatggaaaagaaagtacattttaaacttcacaaagttaaaaaacattgggtaactattgcagtgacaggacttgctctgggattgagttttgcaggactcagctacgcttcagctgaagaacagcctacccctgttaatgaagcaactattgaagccatcatcaaagaaggcgctattgacgtcgatgctccagcaagtaatgaggccacaactaaacctacagaaaatacaactactaccgcttctagcgaagctgccacagtgtcagaagcaccagtggccagctctgaagtagcctcaacagaaacagtttctgaaaaaccaagctctgaagtcacaagcacagctagttcggaagtagctaattctgaaactacacattctgaggtaagtgcaacaaatacacctacaaacaacgaaaacctcatcataagtacttctcctgataaaacaactttagatacctcacaaaaagatggtgatttcaccatcactgttgaagcggaaggtatcacaaaaaaggcagataaaagagagagtttcgtttcagatgcaaatggtgttacctattatgtagatacaaaagggcagctggttaccggaccaaaagaaatcaacggtttccaatattactttaacgatgacggcactatggtaaaagggcagcttaggaaagttgacgacaaactgcacttttatgatgaaaacgatggcaagctagtaacagaccgttttattacattcaaagacaaccactatattccagaagaaaactatagtaaagttgtttacttcaatgaacctgcttatatcgaaccaaactattatgtaatgcctggattagaacgttactatttcgataaaaatggtaacacacttaagaaaggtcgtcagacaattttaggtgacgactattacatctatgacgatggccaagttgctgttcatagactaatggagttagatcacaaacgctactactttgacgacaaaggagccttagccaaaaacaaacaatttcctatcatcgaaaagggtcttcggaagtctatgccatatgtattttattcagaccacgatggggtggctgattatctcaataaacaactaaacattgtggcttatccgttcccaatttactatactcttccttcagaaaataatatagaatatccaaaaaatcaatttatgatggactacgaaggtcgttggtattacttcaacaaagacggatttcctgtcactggacctaaaactattgatggctttgaactctacttccatgaatcatctcgtccagaaggacatcaagctaaaggcgaattcattaatattgataataaaatctactacttcgacaaagataatggtcgtaaagtcaaggatacatcttttgagttaaacggtatccattatatcgcagataaagagggtaacattactatccaaggtgattctagattccataaccaatatgtcagcgatgataaaggaaactggtattactacaacgccgatggcaataaacttattggcgaacaaaccattgataacatcaaagtttactttaaggacagtggagtccaagttaaaggacacttcgctccgaatggacacttctatgacaaggatagtggtgaacttgttaccaatgcttatgtagaagacaatggaaactggtactatgtcgatgaaaatggtcaaaaactcattggaaaccaaattgtcgatagttatcatgtttgttttgacagtgatggtcgtcaactaaaaggtgaagctagctactcaaattcaggtctaccaaaacattactatgacttgcataatggacaaatggttatcaactctcttattcaaatcgatggtaagacctataaagctgataatgaaggtaaactctctgaagtaccatatgctttaaactatcgcaaccaaattgttaccgatgactttgaaaacagctattattatgactaccaaggaatgatggtcaaaaatcaatacgttactatctatcacctagagaatgactatcttaaccctaaaattagaaaagtcacctattatgcaggatatgacggaaaattccttcacggtccccaaacaataaatggtgttgctgtttatttcaatgcctatggtgaacaaatcaaagaccaattcgcagacgatggttactattatgataaagataccggtgctcgtgttaatttaggtgtcaaccgatcagttatgataaatggtaaatggtattatgttgaccaaaacggaaagcaatctaaaggagagtttattaaacaaggaggaaacaaatactactacgataaaaataatggtgagcgtgtcattggaacactttttgaagtgaacgataaactttatatttcagatcaagaaggtgtcattactgaaaagaaagatgatatcaaaaaaaatggactgttttatgatgactaccacaatatccattatatgaatgataatggtcatctagctaggaacttatacgtcccttctgaccacaatggatttagtgatgatacaaaaccattttactattttggttccgaaggaatcgctttaaaaggcgaacatactattaatggtgaaactgtattcttcgatgaaaatggggagcaagtaaaaggaggtttcgcaaaaaacggtaaatattacgataaacatacaggtaacttagcaagaaatactttcagagaacgtactgtaagaatcgctcgtgaatggcgtgctaatggtatctcaactacattccgctactacctagataatagtggctacaaggtgtcaggttatcagactattaacggtgaggactactacttctaccctgatggaccacagttaaaaggggatttcgcaccagatggtagatatcacgataaagacaccggagctttagtcacaaatcgttatgttcaaataaaaccatggcattttatcaccgacctaggtaatgaccctatcgaccataattatgttcaagtatttcaattcgatagataccctagtctagcagacacctcaactggtgcaattacaagatattttggtaaaaaatattctgatagttggtactacgtcgatgaaaatagtcaaaaggtaactggacacaaaactatcgataatgtaaaggtttactttgataaagatggtaaacaagctaaaggtattgttgctgatgatggttattactatgacaagaatactggtgaacttgttgacttaggacgtgacaaattcgttgacgttgacggttatcgttactatgttggtagtgatggtaaatgttataaaggtgaacaaaagattggagatgattactactattttcacgatgatggtagactaggctacgacgaattgcgaacaatttgggcgggaaatgactactactatcattattattacccaaaaactggaaaacgtgctaaaaatgttgacattacttttaatcactcaattcgttacaaggtgaaagctgaggttgttcatttcgatgaaaacggtgatggaagggttattaaatatatttacgaataatatttatttcacacatataattccaatttatctttcaatgaaaggagaattatcatggaaaagaaagtacattttaaacttcacaaagttaaaaaacattgggtaactattgcagtgacaggacttgctttgggattgagttttgcaggactcagctacgcttcagctgaagaacagcctacccctgttaatgaagcaactgttgaagccatcatcaaagaaggcgctgttgacgtcgatgctccagcgactagtgaagccacagctaaacctgcagaaaacacagctgctaccgcttcgagcgaagctgccacagtgtcagaaacaccagtagctagctctgaagtggcttcaacagaaacagtctctgaaaaaccaagctctgaagtcacaagcacagctagttcggaaggagctagttctgaaactgcacattccgaggtaagtacaacgactagtgagagtgttacagctgagaatgtgtcatctgttggtgatatcccaaacgaaaataccacgagaggaactgaccgttctgcctttactgaaaaaagaaatggatttgtcaccgaacaagaagaacgcatcgaaacagttaactatgtaggtagtcttattaccttaagacatccttattacgttacttattactacgataataacggtaataagcttatgggatggcaagatattaatggagaacgctattatttcaaaaaagagcgagaacatcctggtttcgaaaccattgatggaaaactctattactttacagatagtgcacgtatgctccatgatgaatttgttgaagaaaatggtcaaacttactatctaggtagcgatggtgtgcgagtttctggcttacaagatatcaaaggacaaacctattactttaatcccgatagaaacgaccaacttagctacggcttgaacgtggttggtgacaaactctatctttttggagatgctggcaaagaaaatccggggcaattaattaaagacactcatctcaagaatggtgacttccaactaaatattgatgctagtggcgtcgtaacattagctaataaccatccagcttttctacaagataattctgggcattggtattatatgaatacagatggaaagctagttactggaccacaaactattgacggcttaacctattactttgactcagatggtagacaggtcaagggtgaacgccgtaaggtcaatggtaaatcatatttctacgacccagataacggcgcccttgtgacgaaccgcctcgtcacattcaaagctggacgattcattcctgaagaaaactatgctaaagaaataagatttgacgaagctccttatgcaaattatgataacaatgaacatcctgaactcgaacggtattatttaggtgccgatggcctaccagtcacaggatggcaaaccatcaatggtaataggtactttttccaagatgatggaaacatggtcgtgcacagatttttcaataactattacttctacaatgatggaactattgctagaaatagacgattgaatattcctacgcactatattatgagagaatttccaaatatctatgaatttgataatgatggggttggtaaattcatttctagtgattttaaggatcttcaccctaagactactgcttattttgtccaagataaagatggatactggcgttactataatgaatatggatttcctgtcgttggccctgcaactattgatggctacgacatgtatttccatttaggaactcatagacaagctaagggagagctcgttgatatcgatggaagggtttactattttgataaagataacggtcgaaaagtcaaagatacaacttttgatttcgatggtaagacctatgtggcagaccaatctggtgtcctcagcattaaaagtcaatcaactgaacgaaaccgctatatcagtgattccgaaggtaactggtactatgtcaatgacaagggttacctcctccttggtgcccacaccattgataacgtcaacgtttatttcggcaccaatggtgtccaatacaaaggccattttgctcctgataatcactattacgataaagataacggtgctttagtaacagatagattggttgaggatggcggcaaagagttttatgttgatgaagaaggaaagaagtttaacggtactaaatatttggacggaattcagtactactttagctacggtgaaaaagtgaaaggtgagtttgattatcctatcagtggtaatcgttattatgacaaagagactggtgcccttgtaactggaaaatacttcgaacataagaataactggtattatgcaaatagtaagggaaatattctgactggtagaagagtcatcgatggcaagcatgtctacttctacgatgatgattatggacaatataagggcatacaagctaaagataaactcatcattttaggtggtaagacttactattatcttcctggctctggtaatcgtgctgataatgtaaccttgacaatcaatcacgttacttattactttgataatgacggggttggccatatccttcgataatcatttacaagtgactatggatttcaattactaaatacaaaaggaagtcgaccaactgtcaacttccttttttatatcatcaataactgtcttacaaatagaatccaaatatgaactattcttaaacaattacgattatcttgtaaaaaaacttgtttgtcataaaaaaagtattataataaagataggtgagcatgtaagcgttttactaaaaacgttgaaagtgtactacaggggattaggattaggaacttggctttagacttctaacgtcaaaataattttttatgcatgaaaactggtccttaggcactttggcatgataatctaaggctcttttcatacacacatcagtctataatataaaactagagctttagagagattgcttcaaactaaaagctctagttttttgtatttgaagacatatgccataggttggattcaataattaaacgaaaggagagaaataaaagtattaggataaaaaaaataaaatcacttgtttctagatataaactacacagcataagcatattctccttgccacacatttgacgtgctcgcctataaaatcgtcttatggccatgccctgagagatttagatatggggctcagtcgttttaatagatttgctcacttttaacactcttctgacggcccagctcctttatgttacacacctaaacatcggtgttcatttttgaagggagtctattatgaatactgaaatgaattatcattggcaaatgtccaagaaacacgtcgtagcactttcctgcgcaactgctctagctacttttactttagtcgcacgacctgcatttgcggatgaagcgaaaacacctgaaacttctagtcaaccaactgagattcttgcacctgcacaagaaactgcagtaactaatgttgaggtcaaagcacctactacaaatcctatttcaaccaatactgagctacctactagtacaagtacggttcttagtgaagctcctagcagtgaagtcgcatcatctgaattagcaagcgaatcaccagtagaaatcacttctgaacaaagtaatagcaatcaagaaaatgaggccaataaagctatacctatcaaaacagcaacttcagaagcatctgctacaaagacttcgtcagaaaaagtcaatgaacctattcctgtcgaagaaacaaaaacacctacaaaaaacagtgaacaacctgccccaatcgaagacaatgaaaagccagtctcaccttctgtaacacttgaaaatgcacctcatatttctggtggacattattatagtgatgataacggtaactggtattacaaggatgcaaatggccaaaatcttgtcgggctgaactatgtggacaatgttcctgtttactttagccaagacggtattcaaatcaaaggtagttttgcagaggatggccgttactatgacaaagactctggtgctcttgtaaccaaggcctttaaagaactcttaacttatattggtcgtgatgatatcaacaatcaaaacatctatactactgattggtactacctcgatgccgatggaagaccacttaaagggcctcaaaatctcggtggaacaaacatgtacttcttccctaacggagcacaagttaagggacgtttcgcacctgacggacattactatgacaaagactctggtgcactcgtaactaatagctttgttcatgtctacaactggaattatcaaaatcaagacggaaatcgtgtgaatcactttgtcatcaccattcctaataattcagtcgttggacctaatggtgaaaaccaattttgggatatgagtcattacccactttctagcaatgatttgaatcgcgaagatttctactattacgtagatgataagggagacaaactgacaggacctcaaaccctaaacggcatccatgtctacttcgaccaaaacggtagacaacttagaggtgagtttgaatttgacgaagatggtaccgttcattattacgatgcgaaaaacggtgcacgtgctgaaaataccattgttagaacaaatactggtgccttcaaattcgatgcaaacggtaatggacatttgatgaaacctggtgaagaaatagatacccccgtcactcctacaccaactgtctccctagacaaggctccacgtgtttttggtggtcactattatagtgataaccaaggcaactggtactacaaggatgcaaacggtaaaaacctcatcggtctcaacttcgttgacaacattccagtctactttgacaaggatggcaaacaagtcaaaggacgttttgcagaggatggtcactattacgataaaaactctggtgcacttgttacaaaacgctatcttgaaactgaagatggcaactgggtttacgtcaatgacaaaggtgataaactcaagggagaacaaactattgatggtgttaaagtctactttgatgatttcactggtacacaagtcaagggacattttgcaccaaatggtaaatactatgacaaagattctggggctctcgtaaccaatgcttttaaagaaatcttgacttatattggtcgtgatgatatcaacaatcaaaatgtctatactactgcctggtattatctcgatgctgatggtaagccattaacaggacctcaaacctttggaaatagtcgcttgtacttccttcctaatggggcacaagtcaagggacgcttcgcccctgatggacactattatgataaagactctggtgctctcgtcactaatagctttgttcatgtctacaactggaattaccgaaatctcgatggtgatcgcatcttccacttcactattaccattcctggaaatgatatcgtaggtcaggatggacagtacccaagagaaagtaaagatttagatcgtgaagatttctactactatgttgatgctaaaggggataaactgacaggacctcaaaccttaaacggcatccatgtttacttcgaccaaaacggtagacaacttagaggtgaattcaaatttgacgataacggaactgtccactattacgatgctaagaatggggcacgcgctgaaaataccattgttagaacaaacactggtgccttcaaattcgatgctgacggtaatggacatttgatgggccctggtgaagtttaggaatataattcaaataacaaccattgatatcgcataattactttgatttagtaatcgttaaaaaggaagtcgaccaagtgtcaacttccttttttatctcacaaataaactttttcttccactttaagaaaactttaggctttgctttatatactataaccatcctaaaacttttctttttcataatctcctaaatccagggctcgggtcctggatttttttgtgcggtcaagaaataaacgatgtcataggttttgagctattgcttttcttcttttgcctgattaatcatatctaggaaataagcatgtaccctttcgtcacccgttaattctggatgaaaagaggtcaccaagatctgcttctctctagctgccacaattgccccattgacttgtgctagaatctccacttctggtccaacagcttcaataattggcccacgaataaagaccattgggatctcccctattcccttaaattcagcatctgtgacaaaactgcccaattggcgaccataggcatttctggctacattgatgtccatgcttgccaaatgttttgtttggtcccccactatggttttggctaacaaaatcaaacctgcacaggttccaaatacaggtagtcccgcatcaattttcgtcttaattggctcaaaaaagtctaaatcatgcaaaagttttcccatgactgtcgactctccccctggtagaatgagcccgtccaaatcagcgtgagcttcccaatcctgtcgatttctgatttgaaccgtttcaaccccaagtgctttcaagacctgctcatgttctgcaaaagcaccttgcaaagccagtattccaatttttgtcatctattttcctcgctctgccattaagatttcaatttcatccttgttgataccaaccatggcttcccccaaatcttctgacacttgcgccaaaatatctggacgattatagttagtcactgctttgacgatggcctccgcacgttttttcggatctcctgacttgaaaatccctgaaccaacaaagacaccttcagcccccagctgcatcataagggcagcatccgctggcgtcgctacaccacctgccgcaaaattgacaactggcaacttgccatgttcgtggacataacggaccaaatcaattggaacctgcaagtctttagcagtaatatagagttcatcttctcttagattttgaatacggcgaatctcttgattcatgagtcgcaagtggtgaacagcctgaacaatatcaccagtcccaggttcacccttggtacgaatcattgatgccccttcagagatacggcgaagagcctcaccgaggtccttggctccacagacgaaaggcacatcaaatttggttttgtccacatgaataagatcatcggctggtgtcaatacctcgctctcgtcgatataatcaatctcaattgcctgcaaaatctgtgcttccacgaaatgaccaatacgcaccttagccatcactggaatactaacagcgtcctgaatttccttaatcatcttaggatcactcatacgtgacacaccacccactgcacggatatcggccggaatgcgttccaaggccatgactgcagccgctcctgccgcttcagcaatacgtgcctgctcaggattttgaacgtccatgatgacgccccccttaagcatctgtgccaaatttttatttaagtcgtaacgatttgtcattgtaatcacctctcatgtttttatgccctttattttacacaggatgatttttgaaaaaaagactctatttcccaaactgtatggggacaattaccatttcaagcatatctatagacgaaaaaataaataaattaggaaaactcttttataggctataactatcacgaatataagaatctttttataaaatcatggcgtttttgtatccgttttctattgaagttattagaaaataggattaaaatataatcgtaaattaatttttggtgttcatcttgttttaaatgtcacagcatgaatttaccaagtcaccatataagggggaaaattatggaaaacaaagttcgtttcaaacttcataaagttaagaaacattggatcacaatcgctgcctcaagtttggctatcggggcttcactaattggactaggacaggtccgagccgatgaagtcaaaccagaaacgactgctgttaacagtcctgaaaatgtcgtctctgacagcaatcttgagacaagtgctagccttataacaagaaccgaagtagctccaacgagtacagttgtcgagaatacttctagtgcagcagtatctactgacactacacctactaatgtcgctactcagccaatagaaacaactgctacacagcctagtaacgaggccgataaaaaggttgaaaccgctcaatctagtgaaacaactattgctgataggggtgctgaagtctcatctgaaacaagcgacaacgtaactacttcacaggaaacaccctcacaaggtggcaagttcacatccgatgatcagggtaactggtattacctagacaacgagggccacaaactaactggcccacaaaccatcgatagctttaacctctacttccataacaatggcatccaagcaaagggtgaaaaggtaaccattgatggcaaggattactactacgataaagataatgggcgtaaggtaactgatacaagtattgaagtagatggtaaaacttatctagcagatgctgatggtatcctaaccgaaaaaacgcaactacctactcaggtcgtgacgggtggtcatttccaatctgacaaccaaaaagattggtattactacactgccaacggtgaaaaattgactggttggcaaaatgttgatggtgtcatcctttattttgataaagatgggaaacaagtcaaaggacaagaacgagagattggtggaaaatactatcgattcgatgagaatgatggttctctattaacgaatcagtggcatcacacttcaattttcaatggctataggacagaacctcaatatacaacttatactaattacttaggcgaagatggtgctgcatttattggatggcataccattgacagtaaacgttattatttcaaacctgacggacttttggctaaaaatgatactgtcacaattgatgggaagatttatctttttgattaccaaggacaattggtcaagaacaaatatggcattgttgaaactccttcaatgttccatgcaaacacttctacctaccgtaccaatgctaacggcgaagtcttaactggtaaacaaattatcgatggaaaagaatatatctttgcttcaaagggtcaagttcttgatggtatcataggttatgacagcaaactttatctagtcacagatagtaaaatagaaaaaaactattttggagcccttttttcaaaaaaaacattttggggcgggcctagtttctctggaatctatggaactgataaaaacggcgtcctcctagagggcatccaacgaggctccgatggttaccttcactacttccaaccaaaggtggaaagtattaacaagcctacgtggaaagaaatcgatggcaagcgctatcgtctaacaaaatcatatcgaacagaaagatatgctggtatgtacaccactattatccttactaacgacactttgaaagtcgatgataagacctacacaattgataatgagggagtagtgactgaatttacggctaaaaaccaatttgttcgcgatgatttctggaactggtactactacgacaaagagggcaaactcctaacaggccgtcaaaccattgatggtgttcaactctactttgataaaaatggtaagcaagtcaaaggtagcctagtagacattgatggtaaaacttactactttgacaaagacagtggggctatgtggacgaataccactctcgaaaaagacggcaaaacttatatcatcgatgaaaacggtgtggctactgagaaagtgaattaaaaaggaaagacataatatttctaccactttaagaaaactttaggctttgctttatatactaaaaccatcctaaaacttttctttttcataatctcctaaatccagggcataggtcctggatttttttgtttttagaaaagtctgtagcaactaaaatcattccctctctcactcgcatcacaatgtaatcgttttcttatttttatcaaaatttcttatatttccttgaaagtctctaaaatagcgctataataggacttaggaaatggaggaaaaattatgaaagtacattctaattttactggacaaaagtccacaaaacgtctgattgcattctcatgtgcaactgctcttgcaagttttactttaatcgcaagacctgccttcgctgaggaagctaaagctgataacgcatcaaaccttgatgtgactgctactaccactgcgaatgtagaaactacagcagacctcgtcgaaacaaaggttgtcgaagcacctgttactactgaaaatgtggctagcacagaaaacaccacaaatgtctcagaacaagcctcaacttctacagcaagttctgaaactgccagtgaaacagcttcaacaactacaagcgaaagtcaagcacctgcagaatcggtctcaggccaaacacgcgaagctgtaactacagaccgggctgccagtgaggctgcatcagcaaccgcagataccaatagtgaaaccaatgttaccggtggtcaatattatagtgatagccttggtaactggtattataaggatgctagtggtaagaacctaactggtgcacaaaaaatcgatgggatcaacgtttatttcgatgaaaatggcatacaagtcaagggaaacttttcaaaaaataaacaatactatgatgcagattctggtgctcttgtaacggattgttatattaatcatcttggtggtgtttactatgtcgataaaaatggtgaaccattaaaaggcgcacaaaccattcaaggaaaacaagtttatttcaatgattacaacggccttcaagttcgagacggatttgctagcaatgaacacttctacgataaagatggtaaccttgtaacagatagctatgtttttagcactaaatacaactataacaacactatctatcctttctatgttgataaaaatggcgacaaattaaaaggtgaacaaatcatcaatggaaaatctgtctatttcgataagtatgatggagcacaggtgcgtaatagcgttgctgacaatgggcgtttctatgatcaagatggtaatttagttgatctagggaaaaaacactacgtgttcatcgataaccattggttctatgttgatgaagatggaaagatacttaaaggtgaacaagtcattgatggtgtgaaagtttactttaccccttattacggatatcaaattaaaggggattttaattctgacggccaattctatgacaaggatactggcgagctcgtgacaaaccgttatattcaattaacacgctacgaatcgaacggctctatggctccaactctagagacccattggtattatcttggggcagacggaaaagtggtaacaggtccacaagttattgacggcgttcgtgtctactttaactatagaggacaccaagcaaaaggagactttggctacgatggttattattatgataaagacactggagcactcgtcaaaaatagctttgtctccttagagcaaccatcaggaacccttatttattacctcgataacgaaggcaatacaattaagggagaacaaattattaatggtaagcatctcaacttcggtgaatacggtatccaagttaagggaaatttcgcacctaatggacttttttatgatgcaattacaggggaacctgttactaatcgttatgttcaaatcaatgaccagagtaactcatataatacccttgaaaataaagataaatggttctatatcggttcagactctaaagctcttaaaggagagcaagtcattaatggcgtaaccgtattctttgacaaagatggggttcaagctaaagggattttcgcagatgacggtttctattatgataaagattctggagcacgcgttaatcttggcaacaatcagtttgttcaagtgaacggtaactggtactatcttaataacgaaggtaaaattgtaaaaggtgaacaagtcattaatggcaacaatttttactttgataaagatggcaagcaagttaaagggaactttgctgaaaatggagcgtactatgatgaaaattcaggagtacaagtaaccaatcgttatgttaacttcaataacaattggtatagaatcggtgctaaaggtactcctcttaaaggtgcccatgtcgttgatggtcataatgttttctttgaccaagacggtaaacagattaagggcgacttcgcttcggatggctactattacagtaaaaattcaggagaccgagtagacttaggacaaaatcattatcaaaacataaacaataattggtattatattggtaatgacggcaaacgccttactggtgaacaagtcattgatggtgtcgaggtctacttcgatagtactggtaagcaggttaaaggaaactttgctgaaaacgattcattttacgataaagatagtggtgcccgccttaaggaacaatttgtcgatttgaatggaaagacttattatgttgatgctaaaggcaaaagacttagagaagggggagttcgaactatcaatggtaaagagtatacctttacgggcggtgcagatccccaccttgctagagaagaatttctatatccttacggctactcttcattctacgatttgaataacaaagaagtcaaagggcctcaattcgttaaggccaaaaacggtaatagatattacattaccgcttctggtcacgtcccattagggcttcacattatcaacggagaactttatatgtttgatgctccgacaaataaatatgctgatggtagggttagtgcgaatggcttgactaaagactatttcccatcacttattcctaatggtagccatatctattactttgataaggaaacagctactgctataaaaaatcaatataaagaggttaatggtaactggtattactttggacctaattggtatgcactaaccggtgaacaaactattgatggggctcatgtctatttccatagagatggcaaacaagctaaaggggaactagtcactgtaaatgataaacttcattattatgatcctaacagtggtgcacgtactgagaacactaccctcactatcgaaggtaagacctaccattttgatgctgagggaaatggaaaactcctcaattagtgtaagtgagcagtaagcattatgaaaaagtaattccatcttccactttaagaaaactttaggctttgctttatatactataaccatcctaaaacttttctttttcataatctcctaaatccagggcataggtcctggatttttttgtttttagaaaagtctgtagcaactaaaatcatcccctctctcactcgcatcacaatgtaatcgttttcttatttttgtctaaatttcttattttttcttgaaagtctctaaaatagcgctataataggacttaggaaatggaggaaaaagtatgaaagtacattctaattttactggacctaagtccaaaaaacgtttgattgcattctcatgtgcaactgctcttgcaagttttgcctttatcgcaagacctgccttcgctgaggaagctaaagctgataactcatcaaaccttgatgtgactgctgctaccactgccaatgtggaaaccacagcagacctcgtagaaacaaaggttgtcgaagctcctgctactactgaaaatgtggctagcacagaaaacaccacaaatgtctcagaacaagcctcaacttctacagcaagttctgaaactgccagtgaaacagcttcaacaactgcaagcgaaagtcaagcacctgcggaatcagccacaggccaaacacgtgatgctgtaactacagaccgagctgccaatgagacagcttcagtacctaatgaaacaaacgtcactggtggtcaatactatagtgatgaccaaggcaactggtattataaagatgccagtggtaaaaacctcgtaggcgaacagactatcgatggccaaaatgtttatttccgcagtaatgggcaacaagttaaggggcctttactcgataggaataataatctatttcgttactacgatgttgatactgggcaactatggacgaatcgataccttgaatcccaaggtaattggtactatttaggtaaagatggctatccactcactggagaacaaactatcaatggtcaagaagtctacttcgattataaaggtgttcaaatcaaaggtgactttagcggagaggactatagctatccagatcaaactttctattacgactctaactctggtgcaagggtccgaaaagaaggtctagttcagaataaaaaaggccaaaccttttacatcaagaacgatggttctaaatttacaggaatacgtgaaattgatggtaatatctactatttcaaagcacgtgaagctgcctctcctgttgataccggcgtcctacaaaaaggaatcagcattttactagaagaagggcaaaattcaccacgtacttatggttttggtacccctactaatattacccgtcgctactattttgactcagttactggtcaagccgttaaaaatcgctatgtccaagaaaatgatggctggtactattatggtgcagatggaaatgctattcgtcctcaagatggtgaagtcaatatagacggtcaaatcgtttacctatatgctaatggtcgtcaagctaagggagagcttgttctcgacaatggtgttcttcgctactatgatcctaattctggagcacgcgtctctaacaccactctaacaattaatggtatgacctatcgatttgatgaaaacggcgtaggtatggatgctcctaacccaaatggttattatagcgacgataatggaaactggtattataagaacgtaaatggagacaacctcactggtgctcaaatcattaacggtcaaaagttatttttccgcgacaatggtcaacaggttaaaggtgcttatggtgattcctacggtgatttatacgcattctacgatattaattctggaaatcttgtaaccaatcgttatgttgaatacatgggtaattggttctatgtaggtaaagacggtaagccagtcaagggagctcgaaatatcgatggacaagatgtcttcttcaactatcgaggggtacaagctaaaggaggatttggtcaagatggcgtctatatgcctgagtactattacgataaagataatggtcgcaaagtaaccaaagctgggtttgttaaagataacagaggcttaacttactatcttgacgagaaaggtaacaaagtccttggacttcatgaaatcaatggtgatttatattacttccgtcgaggaggtgcctataagtacacccaactgggtgacatgtggcaagacagtattaattacatcgatggtaaaatctactacttcggtcatgacggtagagcaattaaaaatcgtttctatcaatggggtaattactggtactacttctatgcggatggttcagcagctactggtgccgttcagattaatggacaacaactttacttcgataaaaatcatggtagacaagttaaaggcgcttttgcaccagatggtcactactacgatgaaaactctggtgaactcgtcactaaccaaacacgtactatcaaaggtgtaacttatcattttgatgaaaatggtaacgcgactaaagtttaagctattccttactttaagaaaactttaggctctgctctatatactataatcatcctaaaacttttctttttcataatctccttatccagggcacaggtcctggatttttttattttttaagttcctatgattgcaaaaattgtgacatttgccatttactcgctttcctatgtaatcgttttcttatttttgtctaaatttcttatattttcttgaaagtctctaaaatagcgctataataggacttaggaaatggaggaaaaagtatgaaagtacattctaattttactggacctaagtccaaaaaacgtctgattgcattctcatgtgcaactgctcttgcaggttttgccctcatcgcaaagcctgccttcgctgaggaagctaaagctgataactcatcaaaccttgatgtgaacgctactaccactgcaaatgtggaaactaccgcagacctcgtagaaactaaggttgtcgaagctcctgctactactgaaaatttaggcaccactcaaagcactacaaatgtctcagaacaagccacaacttctgctgcaagctctgaagttgtcagtgaaactgcctcaacaactgcaaacgaaagccaaactcctacagaatcagttgcaggccaaacacgtgaagccgtaactacagaccgagctgccagcgagacagcttcagtacctaatgaaacaaacgtcactggtggtcaatactatagcgacgaccaaggctactggcattacaaagatgctagcggtaaagacctgactggaccacaaactattgatggcgttaaggtctacttcaatccaggcggtgttcaggttaaagggggatttggctgggacggtcactattatgacaaagactctggtgctcttgttactaataaatttgttgaagaatatggtagaacctattacgttgatgaaaatggtaataaggcaattggttctaaagaagttaatggagcgtggtattattttgagcagtatggtgaactaattaaaaacaattttgctcctgatggccgttattatgacaaatatggtaaacaagtggatttcggaacaaaccgctatttcgaattaaacggggaatggtactatgctggaaatgatggtgctattttaaagggaccacaaaccatcgatggtgttaaggtttacttccgacaatacggagctcaagtcaaaggatattttgtcaaagatgagggggataataaatctcgatactacgataaggatactggtgctcttgccaccaatcaatatgttatcgcttataatccttacaaacatagaaatgaacgttattatgttaacgaccaaggagttcggttaactggtcctcaaacaattgatggtaaacaagtctactttgataaatacgagggatgccaagttttcgacaattttggcgatgatggttacttttacgatcaggacggtaatcgtgttgatcttggtgccaatcgttatgttcaaatcagagacaattggtactatgtcggtaacgatggaaaaattttaaccggtgaacacattattgatggagctcacgtttattttgaatatggaggtaaacaagttaaaggagattttgactataaaaatcaatttcacgataaagactctggaaatctagttactaatcgtttcgttaccgttaatgacaagacctacttcattggagcagatagtaaggctattaaaggagcgaccgtcatcgacaacattgaatacttctttgacgaaaaaactggcgctcaggttaagggaaatttcgcaagtaacaaaaaatattataacagtactactggtgctctcgtaatcaatagttatgtccaagtcgacaaagactggtactacgtaggcaatgacggtaaacggcttaaaggttctcaaaccattaacaatgttcctgtatactttgacccttatgatggtaagcaagccaaaggtgtctttggtaatgacggctacttctacgacaaagattctggtgctagagtagatttgggaacaaatcgctatgtccaagttaatgataattggtactacgtcaatgctgagggtaaaattctcaagggcgaacaaaccatcgatggggttcaagtcaactttgattcttatagcggtatccaaaccaagggaggatttgttgattctaatggtcgagtaatcagtaaagagaactacaatacttatgaaagacctagtaagttctatgataaaaattctggagctcttgtaaaaggtcaatactttaaccacaatggaaactggtactacgctgatgcggaggggaatatccttaaaggctcacaaaccattgatggggtgcacgtttactttgactcttatggagtacaagctaaagacgcaatcgcagaaggctactactacgataaagactctggtgctcgtcacgaagcccctcgtaagcaatttataaaggctggtggtaaattatactatcttgacgatgataataagataagttctggttataaaaaaattgacggtaaggattattttattacaggatatggggaagttttaagaggagaattcggaccttacggttacgaaccatactatgatagtgagactggggctgctgtacgacaaagaggttttgttaaatctggacgtaactggtactacctagatgatgaaggaaataaagtattaggacttgccaaaatagatggtaatctctactatttcagtaatcccgtcgcaacaaaataccgaatgggcgaacaagttaaaggagagctggtgaaaccttatagtttcttcaactataaccgttcaccctatgacaatcctgtctactacttcgatgctgagactggagctgctgtaaccaatcaattcgttaattggaaaggcaactggtactacttcggtaacgatggtaaggctctcctcttcgatcaagtcgtcaatggtcaacacctctactttgattatgaaggtaaacaagtgaagggtgatttcgttacagactacaagggaactcgttattatgacgaaaactctggtgagcttgtaaccaaccaaacacgtaccatcaatggtgtgacttatcactttgatgaaaatggacgtgcgaagcaattgtaaaataagtgtgaaaatcgactaaaattattcttactagtcatacagataaaaaaacaaacaaaaagccaaaatcagcatgctgattttggctttttgttaggtaaagaatttattgctcctttttcagtctttttaggtgtttataaagaccgaaggcacgatccagttgcatagattcgataggacgtttgcccttgatatagagatttccattggtcgcattcatcaaccctgtcttagcaatggcataaccagtaatcattccactataaaggaatctttccagttccttgacatctaaaactcgacttgaaggttcaaggggaccatattctgcttcataaatatctacaagtcttttaaacttataggccgtttttatgggcatatctccgatagttccttttgaataataatgataaagattctgtgggcttaagtctgcagaggctacctcttgaccgttgggcgagtaaggttgtgatttaatgaatgtattgagcttaccaatatcgatgtgggagtcgctaacattttccttaggaacagggaagtcatccctatcaataatctcccttcgtctgatggtagccaacaattcataaggctcaactctaagtctttttgaaaatttttccaaagtatcaagcgaaaccgttcctctttgattgatcaggttatagttggtttgagccataccagatgagactacaaaggctgtcatgcgttctctgacttccccctcatccatatcttccgtgatttccagcttcttgcgaatgttgtgccacaagttttgggtgacctgatcaggatctcttggaaactcaaaaacctcatgctgattatttcgagctaagagctttccaagtgtaatgttttttccagtcaccttggccagaccgttagtaatggttacaatctttaggatatttcccttaggcttgttcataaagagcatccgaaggcttcctgccggaatccccgtggcttctgagagctctctgtaactctttttgtctttccaaaattcccccatacgagctttttctgcattttcccagaaaagctccttaaggggtttgggggcattcggctcatccgaaaatagtcgttttgacatcattgtctccctctaaaattgctgtttataaattagtccaaatctattatctcatatttttaataaaaatcaaatcttttcctaatcaataatcattacaatcagctagtcgtttagagtttttcttgggttaattgagcacaaaaattcccctcgtacttaaacgaagggagttgtttgcctaataattccagtttaccaagagatagataaggcttgagccaaacatatctgctaaggcatgaacgaggaaaaatggaagcaagtttttaaccttatatttataaaggaaataatagaggagaccaaagacaaccccgataaccagagcccatagcatgccctgataggtatggaaggacacacgaacaatagttgaaaagagcaagaccaaccacttatacttgtccttaaccgaggtcaagagtcctaggaagaaaaattcctcgtagaaaccgttgagcaagccataagcaattgccataggtgacaaagccataaacttatcaatcacagccatagggctaataaaggctagaacttgaggactaaaataattatattgtcctgacaaagtacttaccatatcagcaaataagcccatgatagcgaaaataaagggtacccaaaagagaacagaccactttagacggattggcagttgtttaaagtcaaaatgacgtatccagagataaataatcgctaaggctaggaggataatctgcaaggtgaaattgctagagtaagctgctccttcactggctgtatttgttgatgtctcactgattgcggtagaaaggcttggagacaaactggccaaatacatttgtgtcgaacgaacaataaactgaccaaacataatcagcgtaacaataccgatatcaaaccatctcagttccttgagcggctggtcaggatgaattttcttaagtaaagacatgggccttcccttccttctagcatcttcatcgaagactcgtttattatttaaggttattataagtcataatccttaaagtaacactaaaatttgcagtaagattagtatttcatttaaggaaagaaaaagcaagggaaagcatgtttcctttgcttcaaacatgttattaatcattctttttgacaacgctaaccaagacaaggagttggaaaatggctagagcaaataagaccataaagccatttcgactaccttgagccgttgcttgtgcaaagtcaatcttgtgattagcttgactcatagcaacaattagagaggctagggttgttcccactgctcctgcaaattgttggagcgtgttaaagatagcattggcatcagcacgttgatctagcgacagttgtttctgtccattggtcatgacattaccaaaggaaacgccaagccccgtcatgaaaatcatataaaagacgaggatcaacgtattggaaagagagagaccaaacaagctaaataacaactgagcgagtacgatcaggattgctccaatcagaatcggtttacgagcacccatcttatcaagaataatacctgagaacggagcgaatcctgcaccaataatagcacctggaagcaacattaaagctgctgaagttgtattcgagtggttaaccaattgcacatagtttggcaagaggaaactcatcgcaagggatcccaattggaaagagaagaaagcgatgatatgacctgtcagtttacgatttttcaaaatggagaggttgataataggcttgtccaatgttgttgaacgccaaatcaaaaggacaagacctaagataccaatcaaaagccaaccaagtactgagaaactgaagaaggcatgatcagcaaccccatgaaggcctaaaatcaagcccaagaaaagaaagatggtagccagtagactgaggatatctaaagattcacgttgcacctcactcttttgctcaattgaacgaatccctgcaatcagtgaagccaagagaataggaaactggacgaggaagatagaacgccaaccaaagtgtgctgtcaagagaccaccaacagtggggccaatggctggagcaacggctgtgattagtgtcccaactcccatcatgaggccaatcttacgacttggcacctgctccaaaatgatgttaaacatgagaggtagggcaaaaccaacacccatcccttgaaccaatcgtcccaaaacaacaaaaccgaaactaggcgctataaagtcgatgaggacacctaaaatagacaagaggttggcgaccagaaagatggttttcatcttaaacgagcgcttgagataggcagataagggaaccacgcaagcgaccactaggaggtagatagttgtaacccattgtacggttgacgtattgactgaaaatgccttcatcaatacgggaaaggtgatgttcatagctgtttcaccagctactccacaaaatgaaaggattcctgtcgcaaagatggcacacaggaccttggtggagattttttcgtctgacataagtatttgttcctcctaaataaacttaaatattacggtagtgttgtaaaatcttgagaaagacttctctctctttagctgaaaattgctgggcaaactcttcttcctcttttcgaagataagattgacaggcagaagcgatactgagagctttatccgtgagaacaaccgccttttgccttgcatcttttgaagatgtgtggcgttcaatcagccctttcttctccattcgctgtaagagcactgtcgttgtcgaacgctgaatctcaaattcgtgctcaatgtcccgttgaaagacttcttgatccgcatgattggttataaaatcaatgacagccatctgatttccagtcaaatcatattgcctagcaaactggtcaaaatgacgcatcatattattattggcttgttttaacaagcgtccaaaatggtccaaaaaaatgactccttaactatattgttagctaactagcagtatagaagaattattagctcaagtcaatagattctttcataaaaatagaaaaactcaaggacctagaatccttgagttgctatatttagtctttctttacagggatttccttaatcacacgcgccggattcccacctagaacaacattgtcaccgaaggacttggtcacaacggctcctgctccagcaactacattatcccctagggtcacgccaggaaggatggtcactcctccaccggcccagaaattatcaccaatcgtaattggagcaccatattcaatgcctgaattacgctcggttggatcaagcggatgcaagggcgtcaaaaactgacaattagggccaatcatggcattgtcaccaatcgtgataggacagatatccaacatggtcaaattccagttggaataaaaattttcaccgatatggatattaacaccgtaatccgtaacgaactgaggattcatggcaacattttcaccagtcgaaccaaaccaagatttgacaatctctgctctcttgagacggtcaggctcagcattaaaggcccattgtttttctcttgagctggctgctagagcacgtaactcaggatcgcttggcctataaaagtcacctgcaatcattttttcatattcagttggcatggcatactcctttttgcttcttctcctatattgtagtatagaagtgatgttaccacaagcgaaactcccatacaaaagcaagtaaaatattcattccccttaattatatatcgatggtctcaccaacagctaaaaccctataacctgctgcttcaacttcttttttagttgtcttgtaatgactataatcatcaatatgaatgggataaatccttttaggttgaaggaggtcattcattcggtttaacatttttaaatccatggtaaatggtccaccaaatgaacctgattttacagcacctaaattagcaaaaatagcatctatatttttagggacattttgggttaagtctgggtacaaaacagtatcaccggtaaaataaataactttagtttctgacgaactggtgattgttagttgatagccatttaccttaccaactatctttcgcatgatgtaattactggcatgataagcaggtatagctttaatagtgatagaatagccagcaacttgaaatacttgttcttctccccattttaaaacactattatttaagcatgataccccatctaaaattttcctattaggagaaatgaccgtcttctctttcagataatctttccctacatcatccaaatgatcttgatgtccatgagtaattagccatacatcaactttgctaagaagagactcatccttatgaacatgagtttgtttctcggagacaaatcctttaaaagggaccaaagttcccttaggtgataagtcaggatcaattccgataaaaaattgattatcaatagagatgacgccacatgcaacgccacaataagtaaacgaaatagacatagtacctcttttttaaaataagcgacaagttgaaaaactagtcattaacaacaatggaatgagcattttagtacatagctcttgtaactagattatagtttttatcatcacttttatcaataccagcgtatgttcgacaccttcttttacgtttaaaatacttagtttccacagacctcggttaggtaatccacaaaaaaatcccaagtgcactaagcaacttgagattttctttctgtctgggcatgcctgagtcattcagggctttatattatttgtccttttgatctttgtgatcttttttatttttctttttacgtccgttgcggccaagtcctagacctgttaccgatacggtgaagccagcgatattgatggtttcttcaatcttacctttacttgcttcttcctcatttgagagattaattggcatcttgtgtttagagcctttaccctcagcttgacttgaaacaggtgcttcaaagtcatcgcctggtccataagtgactggtccatcatgagattccacttgctcttcgacttggtcgagaacttctaggtcttggatctcttcaacaatgatatcgtctgccttgtcttccttaggtttaccgttaatatcgcctgtaagtgggatatagactaccgtttcttcaaggttacgttgacctactgtcttaccttcaaccttatccttatcagcgctatagccttctacttcaggagtgataactgtttcaaactgacctttatttgaagtccagtagcttgaaccaagctcttcacctgtaaccttatcaatagtcaagctacgtgtccattgagcagtttggatgttattagcaggaagttctgcttgtccatcgctagatgtgtagagaactgtgaaggttacgtctttgatgtagctttcgcgttctggccatttggcaccatctgggttagctgggttgattggtgtaccagcttcttggatgttatctggacctacttgaacggtaccatgacgaagggtaaccatgaagttttggtcaacatgtgaatcgccatcaaagatcacaccgtttgtgaagccatctgcaaggagggtataaccacggtcgctatagtacttgatacgttcgattgttgagtattcaataacttcgcctgatttaccaagcaagtcgaccacttcaagtttcttacgagttgtaccgtcaacataagtgactgtagctttctgagcatccttgaggtaagtaaccacttccatgatttcaggagtttccacagaaacctctgtcatttcagcgacttccatacggtctggtgtgaatccgacaacctctggtgaaggaacagctgagaagccagcttgagtacttgaccatgcttcataattgatagcacctgtcacaaggttaacattagccaaacgtttgaaatcaagaacttcaacgtagtcgtcgctagccaagccaccttcttcgaagacatactggatggtacgtgtcacatcggcacggttttcaagcatctctacgctatttggccaaactgggctattcacatcatttggatctacgacttcacctgcaactggtgctggcatatctgggtcgataagaaccaaacgttcacgaagaaccacttcgaagacttggtcaaagtcagagtcaccattgtaagtgtggtcaaaggcttctgcataaccatcgttgacaagttcataaccttgtttgagcaagtttgcgatttgttcatcagtagagtagtcaatcttctcacctgagcttccgacaacaacatcacgagtcaattctgacttatcaagctcattcatgtaaaggataatagctttttgctcatccttagcataaaccacgttggtatcttgacctgggtgttctggagtaataaaggccttttcagaaatgtaaccaagaacatctggaacgactgtttccatagccatggttggatcttcaggatcgttgttatagcttggagtaggtgcattttcgattggtgtaccatactcatctactggaataatcttaccaagttctgtgtaagtaactgtatcttccacttctggaaggtctggtcgaacttcaagtccaccagcttgacgtttatctgcatagaagccttcaactacaggaacttctacaacatcataagtgaagctgtcttgatcccaagtgcttgtttgttccacttggttaaacttaccgtggaagctgaagctatcttgaatgttgataactggatctttgtaacctgcaccttggaaggtaaccgtttgtttcgtatcttgagtgatatcatctaagattggttcgtaaaccaaggtttggtccaggctgaggtcaattggcaataccaattcactttcagcttggtagccagcaacttgtggtgctggtgtttcaataacttgcgtagcatcttgaggatcattagcataatgaactggttctgcatccgcgattggattaccaaaggtatcaacaggaataatcttaccaagttctttatagacaacactgtctgttgcttctggtttatcaggtgtaacgacctgcataccagccactgccttgtccgcatagtaaccttcgataactgggacattaaccttagcaaaggtatagctgtcttgatcccaagtgtaagtgtcttctgcttgattgtacttaccagtgaaggtgaagtcagactggatattaacagacggtgttgcttcgccagctcctttgaagaagaccgtttgcaaggttggttgcgttacatcttcaaggattggagcgtactcaacaagaatatcgtctgtcaagctctcaggcatgacactttgttgcattggacggtaacccggaatgtgaggaacaagtgtctcactaaccttagttgggttattggcatcgttgttgaaggttggcgttggaacgtttggaatcaagcgtccattcgcatcaataggaataatcttaccaagtggaacgtaggtaatggtttcttcgatgttatcttcagtaacctctctacctttaacttctactcgatccgcaaaatagcctaaaacaactggagcatagatgtcataatacttggtcttgtttggtgaccattctgtctcgtcaacaagctcacctgtgaccttgtcaaaggtaagggtacggacccaataagccttttgcacatcggcatctggcaaatccgcattgccatctgtactcttgtaaaagactgtgaagcttacttctttctcgtaagcatacttagatggccacttaggtccatctggattattaggattgattggagtatctgggacttgctcatggtcaggccctaccttggcaacatcgtgttgcaagaggacaaaccactcttgatcatcaatatccttatcatcaaaaatggcatctttagggaattcgtcctgaatcaagtcatatcccatgtccttgaaagtcttgatacgtgttgctgttccgtattcaatcgcttcacccaattccccggtcaactggtcactaaccaagtaagcaccggtagtttcatcaatataagtgatgctggctttcttgaaaattttacgatacacaaccggagtatcccctcctggtttgttcggtactacacttttaatatctgtcatataatcttgaacagctggtgttgctgtctcacccgcctttcgtggatcttttttgttattgttatactgcttagtcaaagcacctggaatatattccccatcttctgtcacagggataatgcgtcccaatttcctataggtcacatgttccgttaccgttggcacatagggtgtgacaacgttaaaacccgcttctttttggtcagcgaaatagccctggacaactggtaccgatatcttaggataggtataactgtccttgtcccattcgattaagccagtcttcctatctctagtccccgtaaaaacatgattttccatgacttcagggtctggagttttagaatccgctccttgaaaaataatctcttgcttagatggaatcctcacggtttccgattgggcatgattatcaaagagggcttcgtcagctctagcaaaatctaatggagagggggcactgtggtcagagcgactttttgggttagtcaataatttagaaagatctatagtatcaaccaaatcagagtccgctgatttatgtgcaatatgctcttcagcagttcttgctgctgcttcagtcgcatcttccctataggctctcaaaaatactccccctttcttctttttatgagaaataaaatcctatacttgctaagttctcatggaaatcttttctattaagatttcattttccctcggagaagctaacaagttcttatcaaagattaaaatttttgatatctcttatatatactataatacgagaatcgaatttttacaagtaaggtgtaagaactttaatcattttaacccctaagtgaaaaaatagtgctttaatgtgcaatatctatcaagtagtttacgaaagtgacatcaaaatgagattaccccgataacttaaatgatgagtctttaatggagttttctctccctaaagacactctcataagaaatagactataaactatcacaactacttctcatctttgaaagactagaaccttacctcagttgtaagggaacaacctaagagaatggcacagagaaggtctgtgcctagtcctcgactatggaatgccaatgaataactagcattacttttagtatagattgacttttacgcttcgtcaatagattggaaccatttaatgaaattccccagtttctcaagtttctcgtattaagttataaataactaatagcttttttagcatgattactttttcatggaactacagatgtaatgattactatcagactatcatgactaactcaagatggttttaaaatcacttgttcagccatcattaaatccttaacgaaatccgaacatgccataaaaaccgagactactgtctcggttcatacagtttggaaacgattagatttgtcctcggccttgagcgtcaaagtaaacccaccatcctggactcacttcaacccaacggttaacagccatctcacctgaatttggatcatagtaacgaacaacgccgttcacacgaaccaaatgacctttgatttgcttaccattgttatcaaagaggaggttttgaccattgatagtaaccatgcctttgacagcattaccattaccatcgaagtaataccagctaccatcgatttcatggaattgattacggtaaagctcacctgaatttacatcatagtaacgaaggttgccatcaacattagccaaagcacctttcacttgacgaccattttgatcaaagtagaggttttgaccattgatattttgtgaaccttttacggctgcaccatcattattgaagtaagcccaaacacctggttcgatttctgcgaatcggttgcgagccaattcacctgagttagcatcatagtaacggatagtaccattctcattaacagtacgccctttaacttggacaccattgttatcgaagaagagttcttgaccattgatgttttggtgacctgtcacacgtttaccattaccatcgtagtatgcccaaacgttattaccaatttgtacgaattggttgcggcctgatgtattgttattgttgttatctggttttggatcttgtttaccgtttgcattcaagacaccgttttggtcgtagtagaatacttgacctctacggttttgacggtaaccatcacgcaattgcaccccattagcgaggaagaagtattgtttaccatcgatagtcttttcaccgattgccatgcgacctgagttatcaaagtagtaaacatttccgtcgttatctttgataaaggcattcttagcacgtttgccatcgttataacgatagtaaacactgccccagctcttctcaaacttaccactaccatcaccgttttggttgtcgttgttagtagattggttgcttccgactacttttggaaggctaactttaccaccatttgtaccgtagtaaccacttagaccattcttaagcacgtactctgaaccacggtcaagaatgttagtaccattcatgtacttcgcagaccactgtgtgatcttctcgtcagtagtcatacgtttaccagtagagatttgaacacgatcaaagatttgtgggtaaagacgtttcaattcatcaaggaaggcaccaccatatttaccttggtagtcgttaccaaaagtacgtgtcttagcagcgtagaggctatgattgatgattgctccatctttagtttcaccatagttattaacacgagttgctgtaaccacttcatcacctggaaggttatagatttggtctggaacccagtcagcaatcgctgagatacctacagcgtggagtgatttaagagctgctttcaagtcagccaatgaaccgtacttattgtccttactcatagcaatatcataacggtctgtaaaagcataaccattttggatgactgagtcaaggaagctaccatcatcacttgaaacgtactgtggtgcaaattcaaatgatgtgataccccatgatttgaagaggtttgcattttcagcaatcttcttattagtgtattgtgatgaatcttggacgaagtcttggaagttagagaaaccttcgtagataacttgtgaatcaagggcagcatttgattcataaaccaaaccactgctgttcttttctttacttggtgctacacgcacgtcttgactttcagaagcacctactggtacccaaactgcaaggtaaccatcaacttgagggttacggataccacggatttcgtttgcattaaatgtcaaattaccgttaccatcagtgtatttgacaatgccgttagcatcgctatcattcaagtaagtagccacaccatcgtttgttgtcaaaagcaatggacgataagcttggttacggtgagccgcacccatgttaattgtcaagttgcttgtcaaacgaagggcaggttggtttgaaacgataactgccataccttggttacgtgtttctgctgtaccagtatcagaagcactattagcccctgtaccataacgtacagatgtcaagacacctgcagcatcccaaccattagtattaccataaccgatgtagttaaccttcatatcttgaccaccggctgcatagcggatacggcctttcaagagggtttcaatagcatcataatatggtgatttttgggccatatattgaccatcatctgtgtacatgtcaccatagtaaacacgtggcacagtgtccttatgcgtaagcatcaaggcgtatgctgatggaatattatattgtgtgtattgcttgttagcactacgcatgtctctgttgtagatttcaaaggctttcttcatttcatcaagcgtgaaggtattccctgttgattgagggttgatttcatttttgatgatttgaccaatgattgattgtacctctgaatcgtgagcacgaacaaaggcgtagttagccatgcgtttagagtttttaccactttcagaacggtcattgatactatttgaaataagtggttcaactcctgagcggttaccaattggacgcaagagtgaatataccaatgctaagtgcatagggtcatccattggcaattgggcacctttagtgtcttcattgtagtatgggtcattgtgagaccacgcttccaagatagacatgtgtttaatggcttgatcttggctttggtcagaaccatacttagctttgaagtaatctgaagcaatttgaagaaggtcagcattgacattatccacggcatcgacacgaacaccatcgaagttttcatcttcagaaccaccagtaatagtaccgatgttcatgatgtagtggagccagttcaactgctcagcttgaaccgctgggtttgagttgtcgatatcattagccaacaagaactcgaaaccaccgttacttgtatccttagtatacttaggattgtgtttacctgtttggctagttggtgtgcggttcaagagacgataatcagaattagcatggcttgtacgactatcgttgttatagagaagggcaccaccttgcaagtgatcgctgttatcaagattttcagaagttgaattccaacctggttgggtcttcacgaaatttttgatagttgtacgcaaccagtcagtgttaccttcacgcgcaatacgttcttcaatacgtttttgaacttcaagcgctgcttggtccatttgagtttgtgagctgaatgacgtataggtctgattggtaccgagaccttgctccttcatgtagttgaggtagctcgcttggatagccttgcttggccaccaaaccgtaagcaatggacgtttgtcattttcagttgaggcagtccactctttaccatctttcaagatttcttttggacggtaccatgtgttggcagtgaagtaaccatcaacaagttcgatatctttatcagttgtaccataaaaggcattcttgtcaccatttacagtaacgtttgtgtttgtgctatcagctgatgaacctgttccaccgttcttgtcgaagcggtattctttttggttagacaattcaccagtttcagcgttgaagtattggctaccgccgttacgttcaaggacatagttcttacgaatagtgccgtcatcttcaacgtagtattgttttccatcaattgttttgatgtgacttggaccatcagttacgacattgttagttgctggaaggtcgttgtttactactgtgacagtattgttggtattatttgtattgccgttaactggggtagcacgacggcctcctgtaggaccacgtcgagcaccagtcgcacgacgttcacgtgtcgctgcgcgatcagtaactgttgttgtgtcagttgtagtgttgttatttgtcgtatcaacagctgtatcattggttgctgttgtatctgttgtagttgccgcacgatcagtaccgactgtcgctgccgtatcaacagcattcgctgcaactgtatttgttgtatcagttgtcaaatcgaaagttgctgttggtgcggcttgatcagttgcgacatcgtttgtcgctgcaactgctgtagttggatcctgagcagccgttgtatcgttagatacagtacccgtatcaacagtaatatcggggatggctacagtagcatccgtgtgttcgtcggcctgaacgacaccgtcgttagttcctaaagaaaccgctgagactgcaccgagtgacatccctgtaactgcgatggttacccattgtttcttaactttgtgcattttataatgtacttttttgtccataataaaaagactcctttttcccatttatagcttcattctaaatcattgaaagctttttttcaataagattcgataaattttcataatttttagaaaagtccttttattgctttaataacattagttttaaatgagtgtttagaattataaacatgctcattttagttcgttgagaaacagataactgacactctatggctatttagaatgattattgataagagacttcttttaattggattacaaagaaatctaatgaaaattcacaaaatccttaaggcacttctctcaaagcgacaaaaaatactatccttaccaaaccattaggtctgttaaaatagggtcttttttagactatcttctcatacaaaatctaaattctaactatctaagccattcattacttactgaggtgtcagaggggcaagtttggttactctagtgctaattaaaaatactcttttccatcaaaaacgaagggaacagaaactagattgtagagcgacaaatcatcataacaaatagttcaaatgcctatctaccctgctaaaaacaaggaaaaaggagtataataaaggtgaaaagagttaaactatttagaaacaaatagaggggtaggtgagaaagatgtcagtacaacatacaaacttcaacacaagccaagataagggtaagactggtcaagaggtcaataatcaagagctcattaagaataattctccagacaacagtcttgcttctattttccttgcagtcgccttttatttagctatcgtttatcttgccttatttttgctcttaggcctgtcaaatccttggggaatagttattatgattttcctagcacctagtttgattagttttatcattgcaactatttttacaggtgttgggcgtaaaaaagctaataaaaacttcttatacacaagcatcgttttttatatagcttctatcgttttggcctatgaccctgactggggagtttttcgagttataccgattctgttaactattctcgtaacagtgggaactgtgatgtataaacaagagaatgagcaagacaacaaataagagaccatgttcaagtggtctcttatttttatgtagtcattagtatttcaaaaagtcagttccattttgaacctttcacaacatctctaaatcaaaaaaacacctcctagctagaatgaactgcaccccaaaagttagacagaaaaaatctaacttttgaggtgtttttattatgcttatctgagcattgtaaagacttttacaatcctgaaatacgaataatcttcatcctattcttcatttttcttacgtttagcaagaaatccaagaccagttgcagttgccaaggcacccaaggccatacctaatgatgagttttcctcaccagtcttcggaagcgcttgtctaccacgtttgtgcttaggatctctcacttcagaagttgattctgaaacagagactgaagcacttgttgatgcaaaggctgaaagacttgctgatgtactcaatgaagttgagatacttgttgaggtgcttgtgctttgcgattcgctcaacgatacagactcacttgtagaaatcgaagaacttactgaggctgatgctgaattagacactgattgtgattcagacacagacgcactcgctgaaacggactctgagttcgatactgattgcgactctgaagttgatactgaggcagaggctgactctgatgagcttgctgaaactgatacgctggatgagactgacacagatgtacttgcactttgcaactcactcaacgatgctgagttagatgtcgaaagcgattcactagctgaaattgaagcacttaatgaggctgatactgaattagacactgattgtgattcagacacagacacactcgctgaaactgactctgagttcgatactgactgcgactcggaaattgagacacttactgaagttgactctgaggcagatgtacttgctgatgctgatgtagacaatgactcagatacacttgttgaggctgaaagacttgctaaggtactcaatgatgttgcaatacttgttgaagcacttgtgcttccagaggcactcaagaatgccgatgtagaagcggactctgagactgaaacgcttgatgaagcggattctgaggcagatgcacttgcactctgcaattcgctcaacgatacagactcacttgtagaaattgaagaactttctgaaagtgactcactcagtgatactgagtttgaaacagattctgattcagacactgaggcactcgctgaaactgattctgagttcgatactgattgtgactcggaaattgagacacttactgaagtcgatactgaggcagaggctgactcagatgcacttgctgaagctgagacgctggatgagactgacgcagaaactgaggttgaaacagactgtgattctaatacagacgcacttgttgatgcagactctgaaattgaggtacttacagaagttgactctgaggctaatgctgaagcggacgcagacaatgactcaaatacacttgttgaggctgaaagacttgctgatatactcaacgaagttgaaatacttgtgctttcagaggcactcaagaatgctgatgtagatgctgactctgatactgaagcggaggtgctcgctgaggctgacgcagatgcacttgcactttgcgactcactcaacgatacagactcacttgtagaaatcgaagcacttactgaagtcgatactgaggcagagactgagtttgaaacagactgtgattctgatacagactcacttgttgatgctaactcggaattagagactgattgtgattcagacaccgatgcactctctgatgctgactcggaattagagactgattgtgattctgagattgaagcacttactgacgctgactcggagtttgagacagactgtgattcagacaccgatgcactctctgatgctgactcggaattagaaactgattgtgatcctgaaacagatgtactcaatgacgccgactcacccaatgatgctgagttagatgtcgaaagcgactcactagctgaaatgaagcttgaagctgagttcgaaatagattcaacagttgaaataatcgcagaaattgaagcactaaaggcttgagactggctttcaaatgcagaagcactcaatgagcttgacgtactcaatgattctgactctgaagtcgagattgaggaacttgtgctctgtgattcactcaatgatgcagactcactaactgaaattgaagcacttaatgaagctgattctgaggttgaagcagactgtgattctgaaactgaggcactttctgaagctgactctgaggttgaagcagactgtgattctgagattgattcacttactgatgctgactcggaatttgattcagactgtgatatcgatgttgattcacttactgacgctgattctgaattagacactgattgtgattctgagattgattcacttactgacgctgactcggagtttgaagcagactgtgattcagaaactgatgcacttactgatgctgactcggaatttgattcagactgtgattctgatacagaagcactttctgatgctgattcggaattagacactgattgtgattcgcttactgatgtactctctgaggctgattctgagttagacactgattgtgattctgagactgattcacttacagatgctgactcggaattagacactgattgtgattctgaaactgattcacttactgaggctgattcggaattagacactgattgtgattctgaaattgattcacttactgaagcagagactgaatttgattcggattgtgaagctgacgtcgactcgctctctgaggctgactctaagtttgaaaccgattgtgattctgatacagaagcactttctgatgctgattctgagtttgattcagactgtgattctgaaactgacgcactctctgaggctgattcggaattagacactgactgcgattctgaaatggattcacttactgacgctgattctgagtttgaagcagactgtgattctgaaattgattcacttactgacgctgattcggaagttgaagcggactgtgattcagaaactgacgcacttactgaggctgattcggaatttgatacagattgtgattcagacactgatgcactctctgaagcagattcggaattagacaccgattgtgattctgagattgatccacttactgacgctgactctgagtttgatgcagattgtaattctgatacagaagcactttctgacgctgactcggaagttgaagcggattgtgattctgagattgacgcactttctgacgctgactcggaattagacactgattgtgattcgcttactgatgcactttctgaggctgactctgagtttgaaacagactgtgattctgaaactgacgcactttctgacgctgactctgagtttgaaacagactgtgattctgaaactgacgcactttctgaggctgactctgagtttgaaacagactgtgattctgaaactgacgcactctctgaagcggattctgaattagacactgactgcgattctgaaatggattcacttactgacgctgattctgagtttgaagcagactgtgattctgaaattgattcacttactgacgctgattcggaagttgaagcggactgtgattcagaaactgacgcacttactgaggctgattcggaatttgatacagattgtgattcagacactgatgcactctctgaagcagattcggaattagacaccgattgtgattctgagattgatccacttactgacgctgactctgagtttgatgcagattgtaattctgatacagaagcactttctgacgctgactcggaagttgaagcggattgtgattctgagattgacgcactttctgacgctgactcggaattagacactgattgtgattcgcttactgatgcactttctgaggctgactctgagtttgaaacagactgtgattctgaaactgacgcactttctgacgctgactctgagtttgaaacagactgtgattctgaaactgacgcactttctgaggctgactctgagtttgaaacagactgtgattctgaaactgacgcactctctgaagcggattctgaattagacactgattgtgattctgaaattgaggcactgactgacgctgattctgagtttgaaacagattgtgattctgaaactgattcactttctgacgctgactctgagttagacactgactgtgattctgaaattgacgcacttaccgatgctgactctgagtttgaagcagattgtgattcagaaactgacgcactttctgacgctgattctgaatttgaaactgattgtgattctgagacagacgcactttctgacgctgactcggaatttgatacagattgtgattcgcttactgatgcactctctgacgctgattctgaattagatacagattgtgattctgacacagacgagcttgttgaagcggactcactcaaggaacttgaaacactcgctgacttaacggtactcaaagacacactcgttgaagcggactcactttgtgagacacttgtcttcaaggactcactcaaggaacttgagatactcgctgacttcacagtactcaaagacgcacttgttgaagcggattcactttgtgatacgctggtcttcaaggactcacttaatgaacttgaaacgctcgccgatttctcagcactcaaagatgcacttgttgatgcggattcactttgtgagaggcttgtcttcaaggactcactcaaggaacttgaaacgctctcagatttcacggtactcaaagacgcacttgttgatgcggattgactttgtgagaggcttgtcttcaaggactcactcaaggaacttgagacactcgctgatttcacggcactcaaagacacacttgttgaaacagattgactttgtgagacgctcgtcttcaaagactcactcaaggaacttgaaacactcgctgatttcacggtactcaaagacgcacttgttgaagcagactggctttgcgaaacgctggttttcaaggactcactcaaggaacttgaaacgctcgctgacttcacagtactcaaagacgcactcgttgaggctgactgactttgtgaaacgctggttttcaaggactcactcaaggaacttgagacactcgttgatttctcagcactcaaagatgcactcgttgaagcggattgacttcgagattggcttgtcttcaaagattcactcaaagaacttgagacactttttgaggctaccgtgctcaatgaaaggctggtcgatgcagattgcttaacagactcacttctactttgagaaatcgattcctacttagactgactgacactttgcgacactgactggctgtaatcactatccgacaatttcgccgtcacaacattcgtcgtactatctttataagtaatcgttaccgtaccatcactattaaccgtataagatttaatacggttggcaacctctggattcaaggccgacactgccgcaataatcttactcttatctgcatctgttaaggaagtcaggctggtcacctgaatagtgcttgtcggtgccacacccggtgtacgatctgacaagcgaccctgagtaatacgaatctcacccaaaccatttggacggttcatatttgacgcattgtcaatagcagcaacattacgctgccatgtatttcggaaggaatgataaaggtcatccttcaaatggatggtcgttgtgatggttgcaggattatcagtcgttgctgtgatatctcccgtaattggtgcaatattaccagttccgtactggctactaccaaagaaattgccgttcaaggcattgtcattcaaatcggctcttgcaacgactttcatttctttaagcttgccactgtcatctgttgccgtgaaagtcacaacagcatcatcaccagcatagagggtatagtttttcccaccaccttcgagaggcgttgacttaggttccacaccatcaaccgtcaacttggccgtcacttcaggacgcgttccgtccgttacagccacggaattgctagcatctgaatacaccgcataatcaccatacatgatgcgagctttggctgttacaccacctgtttgtaacttaacagtcggcgttacaatcgcttgacccgaagcatctgccacagctgttcccacttcgtcgtcattattatatagaacgactgtggaacctggctcagctcccgtcaccgttacaggcgtctgtgtataagccttgtccaataatctcgtttcaacggttggtgctgctagtcgcttcactggagccgtcacatcattagtggtgttatctttataagtaatggttaccacaccagatgatgaaacggaataagatttaaaatcctttgaagtcgcaatatttgggttagcagtcttaaacgcttcccaaaccttatctttttcagcctgagcgagactacttgtgtcattaacaaaagtactcgttgtcaccgccgtaatcggattacgaataccatcattttgtggcaaaacctgaatacgaagcgtacgtgtcactgactgcttagccgtattagtcactacaaaagaaacattataaattttcccaggtgttacgacctctgtctgcccaacagcccccacaatattaaaggcgactgcactatttttcaatgcagtggtctgaggcacgttgataccattcacacgatcactaccagaggcgtagccaatgcttttaatactatttcgtgtaggaattgtttcaacaacattataagcctgattgatgtagtcagagttataaacagaaatcaaggcattgttagctagccctaaattatactggggtgcacggaggttgctattggcatcaatacgagaaccattacgaggatcacgttgaccagatgtcgcacggagcaccgcattggcaagactatttctagcctgacgagcctgaacaatcgtaggtgccacatcactgtcacgatcagccagactgacacgaatggcatccagggctttatctcccttgagaatagcagcatccgtatttggcaaatcgacagcttgagctttataggtataaatgtctaaggctaaatctttgagtcgcttttcttgttctaaacgctcagcatctgccacaactgaggcagctagcagaccagtcgccgtttctgacaattggcgattcgtttgaacttcggatgtcaaggaagcgtttaataaggttgactccgagctgacaagagtcatccccactttagagtcgctactgctatcactcttgctaactgactgaacagaggcacttgcgctttgctctgaagtttttccaagcgtactctcagactgactgtgagcagaagaatccgtctgacttactgattccgatttagaagctaatgaagctgacaatgaaactgaaagcgaggcactcaatgacaaggatgtcgatttagaagctaattcagaggcagacaccgattggctgagtgataaagactcactcaaagaagcctccgaagtctgtcttgacgcagtttcagatgactcttgactatttacttggctatcttgaacactagacacagactccatatttccaagaacaacagaatcagatgcagctaagagatcagtcttagctcctgcttcactttccaaaatcggctgatcagtcatttcatccgcatgagccacttgagtcgcaacagatccaccaagcaaggccccagttgcaagcactcccttaagcactgtctgacctgaaaaggcaggtgcttccacctctacctgctgagtagcaacagacggtgtatacacaccccctctaagcaccttgaaaagaccaaaattcgacgtcgccgcacgaagccagtgcttccctgacttaaccaatttaaaccgtgtcacacgatcggtttcacgatattgaccttcattccttctaaaaaacatatatactccatttatttttgattaaaacattcctttaaattttatcataaaattaagcaaaaaatctcatttcaagattgctttctagcgattaatcctttctttcatttccccagaaatacgataataatgctaacactaagacttattaaaactatttgtatttttagaatatcaaactaaaaaatcccctaccaattaggaaatcactctaatcgataggggatatttgattgtctagctagaagctaatgattaaacttactaaaacttagaagtcttcactttcttcttcatctttcttacgtttggcaagaaatccaagacccgttgcagttgccaaagcacccaaggccatacctaatgatgagttttcctcaccagtcttaggaagcgcttggctaccacgtttgtggttaggatccttcacttcagaagttgattctgaggcagatactgaagcacttgttgatgctgaggctgaaagacttgctgaagtactcaataaagttgaaatacttgttgaagtgcttgtgctttcagaagcactcaagaacgctgatgtagaagcggactctgatactgaaactgaagcggatgcactcgctgattctgatgcagagacagaagccgatgtgcttgctgactcagaggcacttgctaaagctgacgctgaggcacttgctgattctgacgcagatacagaaactgatgtgcttactgacgctgactcagatgcagaaactgatgtgcttactgacgctgactcagatgcagaaactgatgtgcttactgacgctgactcagatgctgaagcggaggcacttgctgattctgatgcagagactgaagccgatgtgcttgctgattctgatgcagatgctgaagctgaggtacttgctgactcagaggcacttgttgattctgacgcacttgctgacgcagaggcgcttgctgattctgacgcacttgctgactctgatgcgcttgctaattctgatgcagatactgaagctgaggtacttgctgacgctgacgcagatacagaaactgatgtgcttactgacgctgactcagatacagaaactgatgtgcttactgacgctgactcagatgctgaagcggaggcacttgctgattctgatgcagatgctgaagcggaggcacttgctgactcagaggcagatactgaagccgatgcgcttgctgaagccgactcagatgctgaagcggatgtgcttgctgattctgaggcagagactgaagcggatgtgcttgctgactctgaggcagagactgaagcggatgtgcttgctgattctgaggcagagactgaagcggacgcacttactgattctgacgcagaggctgactcagatgcgcttgctgattctgacgcagagactgaagcggatgtgcttgctgactctgacgcagagactgaagcggacgcacttactgattctgacgcagaggctgactcagaggcacttactgattctgaggcagaggctgactcagaggcacttgctgattctgacgcagagactgaagcggatgtgcttgctgattctgacgcagagactgatgcagatgtgcttgctgattctgacgcagagactgaagcggacgcacttgctgattctgacgcagagactgaagcggatgtgcttgctgattctgacgcagagactgaagcggatgtgcttgctgattctgagacagaggctgaagctgaggcgcttgctgactcagatgcagagactgatgcagatgtgcttactgagactgacgcagatactgagtttgaaacagactgtgattctgagattgaagcacttgttgatgcagactctgaatttgaaactgattgtgattcactgattgaagcacttacagatgtactttcagaattagatactgattgtgagcctgaaacagatgcactcaatgacgccgattcactcaatgatgctgagttagatgttgaaattgattcactagctgaaatgaagcttgaagccgagttcgaaatagattctacagttgaaatgattgcagaaattgaagcactgaaggcttgagactggctttcaaatacagaagcactcaatgagcttgatgtactcaatgatgctgactctgaagcagacactgatgcacttgcactttgcgattcactcaatgatgctgactcactagctgaaattgaagcacttactgacgctgactctgagtttgaagcggattgtgattcagacactgatgcactctctgatgctgattctgagttagacactgattgtgattctgagattgattcacttactgatgctgactctgacgttgaagcagactgtgattctgagattgattcacttactgatgctgattctgagtttgaaacagactgtgattctgaaactgatgcactttctgacgctgattcggagtttgagactgactgtgattctgatacagaagcactctctgacgctgattcggagttagacactgattgcgattcagaaatagaagcactttctgacgctgactctgagttagacactgattgtgattctgaaactgatgcactctctgaagctgattctgagtttgaaacagactgtgattctgagattgattcacttactgacgctgactctgagtttgaaacagattgtgattctgatacagaagcactttctgacgctgactctgacgttgaagcggattgtgattctgatacagaagcactttctgacgctgactctgagttagacactgattgtgattctgaaactgattcacttactgacgctgactctgagttagacactgattgtgattctgaaactgacgcactctctgatgctgattctgagtttgaaacagactgtgattctgaaattgattcactttctgaagctgattctgaatttgaaacagactgtgattctgaaactgatgcactttctgaagctgactcggaattagacactgattgtgattcacttactgatgcactctctgacgctgactcagaattagacactgattgtgattcgcttactgatgcactctctgaagctgattctgagtttgaaacagattgtgattctgatacagaagcactttctgacgctgattctgagtttgaaacagactgtgattctgaaactgattcacttactgacgctgactctgagttagacactgattgtgattctgagattgattcacttactgaagctgattctgacgttgaaactgattgtgattcagaaactgacgcactttctgaagctgactctgagttagacactgattgtgattctgagattgattcacttactgaagctgattctgacgttgaaactgattgtgattcagaaactgatgcactttctgaagctgattcggaattagatacagactgtgattctgaaactgatgcacttgttgacgctgattcagaatttgagacagactgtgattctgaaactgacgcactctctgacgcggattctgagttagacactgattgtgattcagaaactgatgcactttctgacgctgattctgagtttgaagcagactgtgattcagaaactgacgcactttctgatgctgattcagaattagacactgattgtgattcagaaactgatgcactttctgacgctgattcggaattagatacagattgtgattctgaaactgatgcacttgttgacgctgattcagaatttgagacagactgtgattctgaaactgacgcactctctgacgcggattctgagttagacactgattgtgattctgatacagaagcactttctgacgctgattctgagtttgaaacagactgtgattctgataccgattcactgacagaggctgactcataatttgagactgattgtgaagctgaagttgacgcactgactgacgctgaagttgagttcgactcagactgagatgttgacgttgatgcactctctgaagctgagactgaatttgactccaactgcgatgcgctcactgaagcactttctgacgctgattcggaatttgaaacggactgtgattctgaaattgacgcacttaccgatgctgactcggagttcgattcagactttgatgtcgacgttgattcactttctgatgctgattctgagtttgaagcagattgtgattctgaaactgacgcactttctgatgctgattctgagttagacactgactgtgattctgaaattgatgcactgactgacgctgactctgagtttgattcagactgtgatgttgacgttgattcactctctgacgctgactctgaattagacactgactgtgattctgaaactgattcgcttacagaggctgactcataatttgagactgattgcgatgccgaagttgacgcacttactgacgctgaagttgagttcgactcagactgagatgttgacgttgaggcgctctctgaagcagagactgaatttgactccaactgtgatgcgctcactgaagcacttgttgaggcactttcaagaagactttctgagatactctctgaaagagatgctgatgcttcctctgatacagaaagagaagatgaaacaacctctgactcagatgctgaaaccgatgcagattctaccttacttgttgatacagattctgactctactgttgaagcactttctactaggctttgagaagtacttagagatgcactcgttgtatcagcttcagattcagactcgataacctgactaccattaaagaagttaacggcaatcgtatcagtcttacctgcataaggcgagaatgtgaaggatgtatcatcaccagtgattttagcagtccaagtcgatgttaaaccataacttttcttagcctgagtaccattcatttggtaaccattaccccaagtaaagccatcaccttgtttcgtaactgttgaagtattagactttggagtagcaacttgattaccactcgaatctgtaatgtagtttgttacatttgaaggtgtcccaagtcctttaccaagggtaaacatcgtttgtgttgatgttcctgtattatagatagaatatccaggagacattcttgaaatattcccaagggttgatgttgcaggattaacataggaaacagtgtagacaaaattcagatttgtcccgtcatttgtcactttcaatgtatagtaaattggaacattatagtttgagtctgttccagttcctgtataaaccttagtctcaccagtcgcaaggttaaggtttgaagtgatagctggagtgccattcactgtagagtttccattgaaaccagcatttgtaagcttggtcatcatgttatcgacggcattaccaagacgctcacgctgttctgcgtaagctgcgtttgttgctgatgccgcaatcaatgttgttgacttagtgacttcttcttgaactgttgtaatagccgtttggatttcagccttggccgctgtgtctgttaattttgcttggtagtttttagcgatattaacgagcaattccgcttctgaaacgttttgatccaaaacagttttctcatcctcttggcttgcagtttctgaagtaactgagcttgttgaagttgctgaatcagaagctgattctgagtttgaaccacttgtgctttcagtttctgactggctatcagaagttgagtactccttgctgagtgatgcagattctgaaatagcctgtgacaattcagcagaaatagattgagagacagattgtgatactgaaactgatgcttccgtgcttgcttgagtatctactgaagagcttgtagactcttggcttgttgatgctactgctgaagcttccgaagctggcgccgcactcaatacaactgactcagagttgactgccacatcttgattagcagttacttggctttccaaagctggagttgtcgtttcttccgcttgggctgtataagttgccactgcgcctccagccactgctcccgccgctgcaatccctttaagaagagcttgccctgagagaagcggtgttttttcttcaacactttgcgctgaaactgatggtgcatctgccccacctttaacaaccttgaagagtccaaagttggatgtcgcagcacgaagccattgcttacctgatttgatcaatttaaaacgagtcacgcgatcagtttcgcggtattccccttcgtttcttctaaaaaacatatctactccattcttgttttatgtattaaaactcaccgataaattttatcataaaattcttgtaagttctaatataaactattatttccctcaaaaaagattgcaaacgctttatgctgtataaatactgaaaatacttgtttcatggcattttcacccatcttacattttgcaaaataaaacttaaagttatcttaaaattcaacccctacttcttctacatctaagatttcagcttactaaactaatcctgtcctctataatgataaggctaaataagacttagactaacaattcagatagcctctctcattttcaagaacgacaaaaagccacatcccatatcggaatgtggcttttttagaacgaagctaatcggcttattcttacttaagagtagttagtttttattaggactagtcactcataagttttaggggtaagtcgaaggaatattattcctcagtttttttgcgttttgccgcaagagccaatccagatgcagttgcaagcaatccaagagctgctgtagctgctacgttagactcttcaccagtgtttggcaattgtgccatttcttgtgcaggtttaactggagtagctttagctggagctttaggagctggatcaactggtttacctggagttggttgttcaggtttacctggagttggtgttactggtttttctggagttgtatcgacaagtttataaacgtaagttacgttcttatcgccttcgatgactttaccagttactgggtcagttgttgtcaagtgaccatcaccatctacagaacctactgggtagttaccttgtggtaccaattcgtaaactttaccatcagcagtaacaattgtcttaggacggttatcgattactgtatcataatctttacctactggttgaccaaattcatctgttacagattgtttgatagtgttaccattttcatctacatagtgaacgtaaacattacccttaggttgtgctggttgttctttgagtttgtagatgtaagtaacatctttacgtccttcgataactttacctgttgtagcgtctgatgactcaaggtgaccttgtccatcaactttacctacagtgtagttacctgctggtaccaattcgtaaactttaccatcagttgttgtgatagtcttaggacgattgtctactactgtatcgtagtctttatcgactggttgatctttttcatcaacaactgaagtcttgattgtcttaccttcagtatctttatagtgaacgtaaacgtcacctttcacttctttgtagacgtaagtgatgattgaacgtggtttttcaactttacctttagttgggtcagatgattcaaggtgtccatcgccatcaactttacctactggatagtcacctttcggtacgatcttgtacgtcttaccgtctggagtcttgattgtcttaggtttttcaccttcctcagttgtgttatatggagtatcatatggtgagtttggtgtgtcttgacgaggtttcttgatttctttacctttttcgtctacataagtgatgattacgtcaccttctttaggtttcgttggatcttctttaagtttgtagacgtaagttacgttcttatcaccttcgataactttacctgttgtagcgtcatcacctgtccagtgaccttgttcgtcgacttgacctactttgtagttacctgctggtaccaattcgtatgtcttaccttggaattcgatttcttttggacggttgtctactactgtatcgtagtctttacctactggttgatctttttcatctgttacagattctttgatagtgttaccattttcatctacatagtgaacgtaaacattacccttaggttgtgctggttgttctttaagttggtaaacgtaagtaacgttcttatcaccttcgataactttacctgttgtagcgtcatcacctgtccagtgaccttgttcgtcgacttgacctactttgtagttacctgctggtaccaattcgtatgtcttaccttcgaattcaatttcttttggacggttatctacaactgtatcgtagtctttatcaactggttgatctttttcatctgtgacagatgctttgattgtcttaccattagtatctacatagtgaacgtaaacattacctttcacttctttataaacgtaagtgattgttgatttaggtttatcaactttacctttaattggatcagatgattcaaggtgtccgtcaccgtcaactttacctactgggtagtcaccttttggtacgatcttgtatgtcttaccatctggagtcttgattgtcttaggtttttcaccttcctcagttgtgttatatggagtgtcatatggtgagtttggtgtgtcttgacgtggtttttggatttctttaccatcattctcacggatgtaagtgatgattacttcaccaactttaggagtttcactttctgacattgattgagaaattgaaactgaagttgattcagagcttgaaagtgattctgaaactgaagttgaagttgatgtagattctgaaaggctagcagatgctgagtatgattcagaagctgatactgattcagatacagaagttgattctgaagagcttgctgattcagacgcagatactgaagctgaggcacttgctgattctgatgcagatgccgatgtactcaacgatgctgattgacttgctgatactgaagctgattcagacgctgatgtactcaacgatgctgattgacttgctgatactgaagctgattcagatgctgatgtactcaacgatgctgattgacttgctgatactgaagctgattcagatgctgatgtactcaacgatgctgattggcttgctgatactgaagctgattcagatgctgatgtactcaacgatgctgattgacttgctgatactgaagctgattcagatgctgatgtactcaacgatgctgattgacttgctgatactgaagctgattcagatgctgatgtactcaacgatgctgattggcttgctgatactgactcagatgcacttgctgattctgatacagatgttgaagctgatgtgcttgctgattctgatacagatgctgaatcgctcaatgaagctgatgctgactcagatgacgaagttgattctgattcagagttatttgtaacgattgaaattgattctgaaatagaagctgaaacagagatagattcagaagttgaggtgctcaacgatgctgattggcttgctgatactgaagctgattcagatgctgatgtactcaacgatgctgattgacttgctgatactgaagctgacgctgacgctgatgtactcaacgatgctgattgacttgctgatactgaagctgacgctgacgctgatgtactcaacgatgctgattggcttcctgatactgaagctgattcagatgccgaagtactcaacgatgctgattggcttcctgacactgaagctgattcagatgccgaagttttcaatgattctgattgacttgctgatactgaagctgattcagacgccgaagttttcaatgattctgattggcttgctgatactgaagctgattcagatgccgaagttttcaatgattctgattgacttgctgatactgaagccgattgtgaaacagattgtgacttagaaaccacctctgattctgattgtgatttagaagcttgttctgacgttgattgtgacttagaaaccacctctgatagtgactgtgatttagacacgacttctgattctgatagtgaagctgatgttgtatcagatgctgaatttgaacctgaatctgattgtgattctactttcaacttatagatataagtaacattcttatcacctgaagccactttaccagtcgtatcatcatcacctgtccagtgaccttggctatcaacttgacctactgggtaattaccagcttctacaagttcgtaagttttaccttcaaatttaatttctttaggacgattatctactactgtatcataatccttctcaagtggttgatcttgctcatcaataacagatcccatgatcgtatttccattaatatctttataatgaacaaagacacttccaacttcctcataaacgtaagtaatggttgattttggtttgtcaactttaccagtaatagggtctgaagacttcaaatgaccgttttcatcaacacctcctactgggtaatcacctttaggaacaattttatatgtcttaccatcagttgtcttgatgatatttggtttttcacctttttcagttgtgtcatatggtgtgtcatatggtgatttaggtgtatcttgacgaggtttttgaatttcgttacctttcgtatctacataagtgataactacttcaccttcttttggtgtttctttcactttatagatataggtaacatttttatcttctttagcaactgaacctgtaatcgggtctgaagttgtaaggtgactatctgagtcaacttgaccaacagtatatgtacctgctggtaccaactcataagttttaccgttgtactcaattgtagctggacgattatctactactgtgtcatatgctttgttgataggttgtttatcttcatctgttactgaagctttaatagttgttccttcagtatctttatagtgaacgtaaacgttacctttttcatctgtcttacggtagtagtgtactgtatcaccagatggtttttcatttgctgatggaattgagtattggacaccaaatccaccaacagtcttaactggattaccagatgcatctgtcttaattgtcttaccatcagcaagcaaggcatacttagtacgtccaccgataacgttctgtgtattaccacctgctactgaattttcagttcccttaggttcatcaatgaacatatagttagcatcaccaacatgaccttttgcaaaccaacctgtaacatatgcaaaacctaatggtgggttatcgctaggattatgccaaggagaaactgttaattcgtaatcaccatttttacttgcaactgtatacttatcagtttccatgtttgttgcagatggaatatacttttcacctggtttaataactggtgttgtgtaaactagtgtgtaaccagtcgtatcagtattattagccatagtagcttcattgtaggttgaaactgctgatggatccaaaacataaagttttgttactgttgaaccatcgttagctacaacttcacggatacgttttacgtaataatgttggcgtccacctttaagttctgcatacttagtacctactgtaccacctagctcaccagacattgttgaagcatccgcttgttggtacaagacataaccttcaaatgaacgtgggttagaagctgtatagttttgaccttgaataccagtttgtgtatatgaagcaagttctgtttcatttccagttggtttataactttgagttgttgtatctgatgatgaacgtgaagcattataagttgatgatgtagtatcaactaccttgtagtgagttgtttggttcatcttagttgatggcacgccaatttcaacgtttggtttgctttcagtttggttggctggagtcaagtagtcaaaaatttgttctgtctttttagcaaacgcagtctcttcattgttcttgataatagcatccacacttgcagaaccaccatctgtagaagcattgtaaacaaagtatgggtaatatttattagctgaaagattacctaggtttacctctttaccagagttggctgaagtcaatgttgtatttgcaacttcatttcctgttgttttatctaccaaacgaacataaacatcaggattgtttgtgctagttgtcttatcaattgacaaagtcacataatagtttgtgttataagcttcgttgtaagatttaaggttccaaacaccgaatgtcaaacgacctgaagctgggtcagctgagtatcctgcaggaattgtagttgacttatcagtaagtgtcgcaccgttagcatcgtccattcctggagttacgtcaacacctgctgaaagtgtatttgaagtagcgattggtgccaactgtgctgtcactgctgcaacaccgttaactactgagttacctgtgaagccgttgtcagtgatcttagtcatcatgttgtcaacagcgtttccaaggcgctcacgttgttctgcgtaagcagcgtttgttgctgatgcagcaagcaaggttgttgatttagcaacttcttcttgaactgttgcgatagctgtttggatttcagtcttagcaactgtgtcagtcaacttagcttgataatctttagcaatatttacaagcaattctgcttctgaaacgttttgatccaagatagttttttcatcttcttgagtagctgtttctgatgcagttgcagctgttgaagttgctgattctgaagctgaagatgattctgagtgtgaaccactgttgctttcagtgtgtgattggctttcagaagttgagttcactttgctaagtgatacagattctgagatagcttgtgacaattctgctgatacagattgtgatactgaaactgaagcgtctgtgcttgcttgagcgtcaactgaagagcttgtagactcttgactagctgatgctggagcttctgaagctactgtttcagatactggagcagcgctcaaggcaactgaatcagagttagcaatgatatcatgatttgtagttgcttggctttccaaagctggagcacttgtttcttcggcttgagcagtgtaagttgctactgctccacctgccacagcacctgctgctgcaatccctttaagaagagctgtacctgaaagaagtgaagatttttcttctacattttgaactgttactgacggagcatctgcgccacctttaacaactttgaaaagtccaaagttagatgttgcagcacgaagccagtttttacccgatttgataagtttgaagcgagtcacgcgatctgtttcgcggaattcaccttcattacgtctaaaaaacatatttacctcctaaaaatatgagtgatttcctaatctggaaattacaatttataatatatcacaagtttactaaaaattgttcttttttatctcattttctccaaaaaatataaggttttcgcaattctgaattttctgattactataaacaattactcttatttttatgtgcaaacggttgaaaacccctgttttatgttaattgtttctatcattctcatttttaagctgaccatcgttcggtttaaaattatccaacaattccatttttgataaattgtcacacaattacaatcaattattttaggcgaattctttacatctgttaagctattattgactattttttaacattaatcctaattagagacagaccttccttaattccttaagtctaaagtgaaaacgatttgaataatttataaaaagtcaagatttatgctcagatttatcacaaaaaaaaaagaattacctttcgataatcctttttctattagcttaatgccatgatagcatcgataaaaagtttcttcgtgaagtaaccgttactaatgagataggctgtgtggcgagcattagccaccatctgtgcatactgctcctcggtacattcttgaacgcaacggtctgcttcttccagacttgaaacgacgaagcctagaccatgttctttgatatagtctgcatttgagaggtagtcaggtacaacaactgggagacctgcggctaagtaagtagagagtttataagagatgttcatcttatagtagtcaagctcgtcctctggtttttccgaatttccccagaccagaccaaatcctcccttagatagttctagcaaaagctcatgtttatttcgccagccttcgaggtggactttggaataatccttatcctcttgtttatctgcgtagacgtggagaggggtcgtttgtttccagtctaagatatgtgggaaacgtgttgggtttccggcaaaaatcattttcttttggaaagcaggctggtgcaagtccagactatgaggtaagtcccaaagtttttggatgataatcttctcaactgttagtccttcctcaattagtcgatcacgcatcttttcagatggaacaacgacgacatcacagagattgtacatgtcaatataagaagacatgagatagtagttactatcaaacatgagaggtgggacgtcatggataaacataacggtcttagcattaacagctttgaatttacggagcaatcggctgtcccactcactaccattccatgatggggactggaagaaaacaatgtctccaacacttagtcctgctacaatcccatcaaagcgggaattaagctctccatctggctcttgactactatcatagaaataaattcctagttcattagcaccaagctctctggcaatcttcatggtatcattttgggcaatcaaggccacactgcgtgaggactggccaaataaatttgtaaaatgtacgcgcatgacatacttctttctattatatgataggaagtcctctacttataagaaacaatcataaaaataagtaagaggataaagagggctatgctgatagccaaggtcaacatttttcgaatcggttggctagcccaataacttggtttaccgatattactagtggcatccgttgagaaaatctgcgtttgacgcggttggatggtcactaagacgataagggcaaccgaaagaatcactgctagaaccataaatactaacatcataagactacctcaacaaaccaataagggtgaaaatcaaaccgatgataataacaagtccgagcatgattgaaaagctcttgttgattttctctcctctggtttctttttcttttgtgataggcttttgcttgagttcttccatacggccttcaacgtcaccgtagaataaatcttttttagacatgatttcctcctaaaagtgattgtaagcggtcggccaactcagaagcagtcagagtattggcttgagcttcttgagcttgcatggcctcttgcatggcttgattgtcgcttaggacctgcttaatcttggcaaccatagctggatagttctgactggcatagatatgctctggtgctgtatagacaggtccatgagctgtttctgaaaaggccagaatcaataattggtgttcaaaggcagttcgcgtcgccttatacaattcattatgatggttaatgtccaaatagaggtcagactcttgatagagcttgtccaactgcttgtgactagcgtttggatggagcacaacgtttgaataacgcatcattgagagcaatcttggggacatctcagtgactgccgcaatctggaaggtcacatcagggagtgactcaaccaaggcttctaaacgctcaatttggtctgaattagttgcaataaaggcattacgaggtttgccatgattttccttgaagtcataggcatagccaagtgacaagaccttatgttttttatcctcaggcaccaagggcaaggctttttcataagtcgccttatcaggaataatgatggcattggctctggctgaattatcctctaagataccattcatattgcctggtaggatatcacccagtggctcttgccagacaaggacatcagtggcacccttattttgcatagtccatgagacgacgaaaggtgttgccaagctattaaagataatgtgatcgatatcaccaaagacctgagctaggaaggctttaacaaattcggtacggttggcgaaacgacgaagggcttgtcctggtagagtcaagagaatatcactggtgagatgattttccaagatacgttcgtcgccttctttggtttggtagctggtaaagactgcctgaccgttctcatcatgagtggttttggcaaagcagaatccgtatttgttatagtggtccacttggcgaatctttcctgacttgtctaaccattcgacacttttaacgatacgagccttgctaccttctgggtaggtgatgcgggcacgttcttcggtaagattagacacacgcgccatctgattgttccctgaaatttcccaaaaggctggcacaggaacttggttgaaaaagcgtggtttgccagtttcctcttctgcttccacataataggtgaaaggagagagagcgccttgagggagaaaaccatctggattgatgacaactgttgtggcatcatagcctgctacctgaagtgagtaagctagatccttactggcttgattgtagtaatcacataagaatatcatgagcgtacctcctcaagtaactgtttccaagctgccttgacttgactggtcaagaagcctttggcaaggtcataagatttttgacgcatggcttcgatattgcctttttcatagagacggacaatggcatccttataggacttggtgatgacatccacaacatgattttcagcgacaggaaggagataaccgttgcccccgtcttcgataaaggtttgatttccgtaaggcacatcaaatccaatcatcggaagacctgaaccaaccgcctccatgagggtaaggccaaaaccttcgctggttgaagctgttagatagacctcgtactggctataaatgtcagtcaagtcagcgtgccccatgagtcggatatagtcgccagcctgtgcttcgacaataatctcacgcaacttggcatccatactaccactaccgtagatatcaaaagtgatatctggcagagtcttatgaacctcgataaccgcacgaaccaaccagtcaatgtgtttttcctgagccaatcgtgaggccgtaatcattgagaatggcttacgtggcttgtcctgtccaaccaattcaggaagacttccaactggaatagtgtagatttttggatcgtggttggtgtagcgacggaactgttcctgcagaatttccttctgacgatcagttgccacgataaagaaatcaaccttgtccgcattggtaaactggtactcgtaatagttattccagagaatatagttgccatcagtttgattgacactaaaatgctcagcgtgaaccactacacctaggcgagcagcttgcgcttcttcaaagaccaactggccaatacctgtttcacggtccaagatgaccacatcatccttggttagggctagacgtttgaagaaatagcgaaggaattcttgcttaccataaagaacctgatcaggaaaacgatagatatcctgattattgtctccgacaatcatgtcataggctgtagacccatcttcgttataaaaacgacgttggtaaaccttggcttgattgtccttaggcgcaaaatactcactgcagtaacgggtgtaagagtaaaagtccttgcgcaagagcttatcgttgacaaaatagctgactgtttccactgcatcttcgtccatcgcacgaaggttacatgccactaccatatcatcctgtggataatggtaacgaatgaggcgaccagcaacttccttgcgctcaggattggcaggtaagatggtctcgatttctgctaggctaatggtcgatggcgcaatcttgatatctgtaaaatagttatggagccagatgatttcatcgtctgaaaaaccaatcttgctagtcatatgctcgatattatccccaaggatgaggtccataaaaacaaattttgcttcttgccccatttccctgaaaatcttagcacgataggcctgagcatattcgacaccactgctggcccaacctatacctaaattaatgttatatactgtcataatttccttattttatgggaaatggctgatgatatctccttttttagtgacttgcacctgactaaggagaagattacgaaccatatcctttctgatttgacgtttcatggcttcgaagcccttgtatgcctcttggtaatattcgacaatagggttcttttgactgagttgctggctaccgatagccatttggagctgttgcagatagtctacttgctctacccagttgtcatccacagccttaagcatggataggcgttggaaatactcgttaagttccttggttttcaactcctgcttcttagcatcaagttcacgataggcaaactggtagatgagctccaagacttgctcacgattgttgaggtctaaatccttaggaatttcattgatgcggaagctgatattacgcaaaatgaaatggtaaagattttccgcttttgagaaatcttcctcagccatagcctggtcgatgaaatcgtcaagaacctcgtcgataacagtgtccaaaccttgattgtggtagatgagacggtcacgttgtgcgtaaatcatctcacgttggatgttcatactctctgcaaattcaagcgtctgacgacgtgaggtacgaccagaactctcactagcttcttgggctttttcaaccaatttacgatacttgcgaccggtcaattccttaggctcaatgtgatcattaatggcgtattctttgtaggtacggtgaacccatgatggaccgtatttcttaatcacatcatcttcaagtgagacgaagaatttagacataccagggtctccctgacgtccagaacggccacgaatttgcaagtcaatacgttgactttccatacgttccgtaccgattacgaccaaaccaccgagttcagccacacccttaccgagcttgatatctgttccacgtccagccattgaagtcgcaactgtcacggcacccatttgtcctgactcagcaatcatctcagcctctcgaggtgcgttgttggcatttaggaggttatgagcaatcccctcacgtaaaagtaaagaagaataaagctctgacatttccaccgaaccaacgaaaatcaagataggattgcctttttcatgataatgcttaacatactctaaagaagcaaagaccttctctggcagagtcgcataaattttatctggatagtcgatacgttgtttcttacggttggttggaatttgaatgaccttcataccataggtatcgagaaattctttttccgcaaccttaccagtaccagtcatccctgaaattttcttgaattttttaaagagactttggtaggtgattgaagccatggctcttgtttcttgtgacaaggccactaattccttggcttcgatggcctggtggagtccaccttggagcttggtcaattccaagagacgacctgtcgatttatcgagaagtaccacttcaggtcccttcttgccatcacgaatgatgtagtccttgtcctttttatagagcaagtgggcacgaagagaaaagagcaggtgacgggcaaaggtgctattttcctcatcgtagaggttaccgataccaaggtaattttcagcagccttagcccctttagtagtcaaccagacttcacctttttcctctttgaagatatagtcctcaccctcgaccaaggtggtcataagcgtatccatcatcccataatagttagactgaacacggggcgcaccagagataatcaaaggcgtctgtgcactgtcaaggaggacagaatccacctcatcgacaatagcatagttaaagggacgcatgtatttcccgtcttggttagaagcaaggttatcaatcaaatagtcaaagcccaagctagaattggtcgtgtaaacgatatctgattgatagatagcacgcttttctgccggttccatctcattgctgccttccacacagggaacaccaatcgacaaccctaggaactcatagacctgacccatttcttcggcgtcacggatagccaagtattcatttgtcgtaacaaggatagccccttcacctgacaaggcattaaggtagactggcatggtagccgtcaaggtcttaccctcaccggtattcatctcagcgatatgaccttggtgcatgacaattcctcccatgacctgaacatcataagggaacatgcctaacacgcgcttatccgcttcacgaacaaccgcaaaggcttcaggcaggaggtcgtccaagctttctccttgagccaaacgctccttaaattcctgcgttttatttttcaactcaaggttgctcaaaccagccatttcatcggctaggccgttaatttccttgagtatctccttaacagggagaataggattcagttgtttaaacatgttcttctcctgtttcttccagttttaagttgtagaaatctagctctttgaccccagcactcaagagggaaatacggtaggtataggcctcgtgagggtatacgaaggtcatgtgggtactcttttcaatgagctgtttaatttcattgtcataacggtccaaaaagctgactttcaaaaagactgagcctgttgggacagcttcaagattggccgtcaaatcatagctgtgcccctttttcaaaagtgggagagcaggctgagtacgaccagcttggtagttttggatggccacccaagactggatttccgttcctgatggcaccaaaggattgtaaaattgcacagaaccatcttggcgtttaacaatttttgagccatacatgtaggctttgtggtttaagccccacaagatttctgatttcttgtttctgaacattcttactccttccttccaaaatcattttctaaaatcatacggtaaaaattaacaaaccaagttgtcgccgtataagaatcatcgttgtgtcgacctgacgttcccttgctgagaatcttagcccctgagtaatagagagacttggtaatatcctcataggccgtcggatccatatcctcgtctttcatataggaaagaccaaaagttgtatctgagaagtctgctttttcaaatttatcccagaacttctgattaagggcctcgacaccttcattatccaagcgtcctgtctgcaaatgcaagacatcaattcctgttggaaagacctctggtgccaaaagtctagcacggttaccgatagtaccaacattggctagaggcttagacatgatgatggcgtgaggctcaaagtccgcaccgtagtacattgatgggaaggttcccatggacattcctgagagaatgagctgactattgtcaaaacctaggtagtccaagtaatgttggatggtgtctttgatgctattttcaagttcttcagttcccatatagaaggctcccccttggagacgagggtctgaaaagagcaagaatggtgttcccatccccttcatcattccgaaaccttcaaaaccttcggcaggacggaaacctgagaagtaaactgacaaaggtggcttgaagtccccaggataaaagaaatagttgatttcctgacgtttgctatcgtggagaattccaccaccaagtacaaatttcccgaattggaaacgagtcaaacgttggtggagcccaccgatagtaatctgaccttggcctttcatctcaagactagcagacaggaggaaggtcgtgtcctcatcaaggacaatggctcccttgcgcatttcttcttctgaaacgatataggtcttaaaaatccctgcgaccgaaccttctggcaaaagattgagaatcaagcgacactcacaagtctcctctttctcaaactccaaccaaagctcaataggattttccttactggctctgacattataggtccagtccaagacaggactgaaatcttgaccataatccccttttaaaatgacattttcataaccatggtaggtcacttggccagtaaaattggggttaacctgggtagtgaaaggaaacatcttatccccgtactgccctgaaaagagcgcttttgaaagggtaaagagcaactgcccttgatttgaaaaatcagttggcacggcgcatatttccttgatgaactgagcaagtatctcatcggtcacttcaatcgtttgatcaaagaaaatagtatgaggaatcaaatgttctttaatagccatcaattcttcaagacctgcaagactgtccacaatgacagctgtgaaagtcttgattttgtcttcttctatggtttcttgcaaggtctcaagctgaccaagattgcaataataccatttcatattttcaggaatttcctgaatttctgaccagttggatggtccaacttgtagtattttcaggcgattatccttggtcattctgctcctccttcaaccaattttcccatttttgtaccaaacggtctcctgtgttttccttaattttctcaattgagtagataagggaacggttccagttgttcaactgtcccaaatagtagtaagcccctttttcaaaatcggacaagtgcttcaagatataaccattttcttggtgggtcacatactcagacgccacacggttaatctgcggaataccagcactaatccctgcaatttgtgtataacgattaggttccttgctcaagtcaacaatgagtcgtgtaaactgaagggacttgataagggcagtctcgtcacgcaggtcttggaaagaaaatcggcttacgatctcattattttcttccaatttattttctgcaccactactttcgacaacctcttcaaaggcatctggactcaatcgttcttcaatcattttttccacttgattttgcaggctaccaagttgctctggattggcattaaatgctccaaattcaacctgtgtcttaggatacttagccacaaaagccaagacctgataaatagcctctaaatccaactgatcgaagtcaacctgataaaagattttagactctttgacacgttgactggttcccaaagccaaacgggtatcgaaggaagccatgtgtttgagtttcttagcctcttctggataggcaacctgaagctgctccaagtaatcgtaacggtcagcaatcaacaagtccactttcggcagaaagacttcataggtgtcaatactatcgtcctgattacgttctgcgaaccaagtcaaaatcttagtgttgtctgctggcaaatgttcaaagaggtgcttgttatggcgtaaatctgaggcaataacaaaacggtcctctgcttctaccttttcgtccaagaatttagtcaaaaattcccagataacttctgaaagttcaccgtagtaactcttattaaaacgaccttccgtacgagggttggctacaattccacggccatcaaagaaatgacagagttgccaaactcccttggcattaagatagtttcgatagcttggttgtccaccttcataataaagactacttgagataaaaccgcggtcatcgtagatgtcttcgcgaatgatttgctcatccttatagtagcgaatcatgccaataaagccttctgagccaaactcaatctcggcataacgcttgtgttggcattgcaccacgatagcaaatggtgtgtgaacaaaggtagccccttctggccattccaaatctgtcacctgaagatttttcatatcttcatcagtgataccctgaatcaagtcaaaaatagctgtatagccaacttccaagacatcatgacgatgcaagaaataacgcaaatgtggttggtaggccaaaagcaaaagctgaggggctaagtcctcatcctgaaagatacgaacttggtgcaagctgtcatcaaattcaattttttggcggatacggtaccaaggatcaatggccgtcttccaaaattcatccgtctgtccataccaagctggaataaaataatacatgagttctccttcattgtcttttcatcacaatacttgagattgaggggcagaccgatcactcatcaccagcctgcctctcaaccccacgaggggtgagagtttatacattttcaaaaagtggggtgtaggaagtgttgagcttcaaggctttcatttcctcgttaacattgtaaatcataccgctaaaaatcaagaatgtcccaggaatcatactcagttgtaggtaatctggattgaccaagataatcagcattggagcacctgccataaagagcatataaagggcaccgataaaaccaagtctaagcaccaaatggttgatataggcactagtttcttggcctggataaacaccgtagatatactcacctgacttacgcattcgctcagagatttgctcaccagagacattaacgaaggcaaaggctaaccctaaaacgaagagcatgatcagataaacaaccaaccaaagaggttgaccgactgtcaaagccttgatggcaccactggtccacttgctttcaggatggataaattgaatcagcataaaaacatactgcggaatactaaccagcgacatggcatacatgaaaggcatccctccggctggattcaacataatatccaagtaagaatactgtttaaagcggttatgaatattgattttattgattgagatacggtatctagccctctgcacaacccctgaaatatagaggaagaccaaactgaatagaatcagaggaagcaagacatcccaaccgatacctaacttttcaatactatccatgatttgatagggcagattggccatcatacttgccatcaagataacaatggagcctccaatcccaaagagagagttgaggtctgatagccaaaccaagaagaaggtcccggcaattaataaaatggtattcatgaaaatagcgagactagcattcacccctgaaacgataggtaaattcaaggatactgccaaagattgaacaatggcaatccctagggccaaatacatgcgtctacggtcctgaatctcaatgggaagatttttcaagcccattttcttagagaaagaaaacatctgccagagaatcatggccgacatccagggcgacaagcccactgaaaatagagacatggacctgaggtttccccccatcatggcactagagaaagccaaggaacctatggctcccccaaagatatttgcatttttcaaatccacaaacggtagaaccaattgatttcccaaacaataaataaagaggaaaaagagggtccataagacacgtttggtgattatcgattgactaatttttttcacaattactcctatttcctgtccatagacaggctgatgttatttcgattgaaacgagacagagacgccatttcagcctacttatccaagcaaaggattacaggctcttcttgcgcatttggcgaatggtctcagccatctctttccaacgatctcttgagtaggtttgttggttatgcttggttgacttaaggtcctcgaaccctaaaatcggtttgttttcaaacctaaaggcatcaagaatttccactacttttcttcctgggttgatatctagaagcaagtcactggtacgcaacaattccaaatctagcccatttaagcccgcaatggctgagtaaaccgtcacatttggataggtaatcaattgggccagtttatctgtcacatgctgtcgagaggcaattttaaactgtaccttaggaagagccgagataaggtccatcaaatgcggaatttctgaaatgttggtgtaaaccaaacaagtaaatggacggcccttaggataaatcatgtcctctgaaagtggcaataaagtggcattttcagcaacccctgaccaatccatttgagcatagaaccaccagacctcgcgataagcttggcaagccaatggtaaccaaggcttacggtgtgaggcataatgcacaaccttaggatagtcttgaccatttggcagatggaaaccagctaaactagacttggtaaccgcatagttgttgtcaaaagacaagggcaaccagttgttacggaagaccatgtttagaatggactgctccgcaaacggtaccttgtcatgccattcgctagtcatgtcaataaagtgccgtctcatgttgtactgcttccaataagccgtatcaatcaccatgaatcctgcatcaaacatcgcctggcggtcctgaacctgaatagcatagtcacgtacagcagccaaaggacgtccttgcaaatcaagggtaaagaggtcctctagagaacctgtaaccaccatgtcactatccaaataaagagcccgttcctcagacacaaagtccgccacaaaatagcgaagatagcttgcatagttgctattagtcttgtattgcttgatatgactactatccacacgacagttaatcacttcactaccaaaggcagccaaatgacggtttagtcctctaaaccactcttgagagaaatcatcgttaatcaagtaaaaacgaatgttgcgatgatggaaaacgatggatttgatggtcgtaagcacttggtcaacataagtatagttagccgcaagaacaatagcacgctttttagtctcataacgttgaggagctaaactcaagacctggaatttttcctgaatggagcggtaggcatcagaatccgtgagaccttgctcctccacatttttcaagcaagcctctagcatctgacggtaggtgaccatgtatttctccagagggaaaccatgactagcaacaatagccaagcgttcttccatggcataaaccaaggtcatcatccagtcttgcatccaagtcgctgacggcatctctggactctcacgatatacataaagtcccttgttgagataaaccgtacgctcactcatgagataggctttaaggttgaaaaagccatcctcccctgcatgctcttttggaaaaagcaagtcattaaacaaagaacgtttgtagagtttgcctgtcgcagaaatcagagcgatgttaatgttattggtttcttcaaagagaccatcaataatctgagccggtgaataaacctgctcataataatcttcatccttgatataaaaataaaagagatcttccgattccttatagacactgtaattggccactgcgatatccgccttgtgggcctgaagagtcttataaagttcctccagataagtagactctacccaatcctcagcatccacgtaggtgacgtaagctcccttcgcctgacgaataccaatatggcgagcatctgaaagccctccattatcctttttaaaatagaggatacgagaatccctagcagcataactacggcaaatggcatcactattatctattgagccataattgatgagaataatttcaagattttgataggtctgccccaggacactgtctagacaggtctggagttgattttctacattgtaaacgggaataattacggaaattttttctgtcattttttatttcttatttttttctagctagtacaattttttcttttcctgtctcaaaccgacataagctttccagaaacagtctaagagtttaataacaacttttaggtcgcaagagatagggacctgaaacacactctatacactttttccttgcttttatcgagacttaaccatattaaattataccatagtatcacttaattttctaatagattagcttttttatgagaggtttttttcaaactaatttccttttattttcagaaaaaactgacagttaaaaagcttcaaaataaaggatagaaaaagagatagccctgatgaggaactatctcttagaaaggtcaaagggttttgagtgaggtctcttaaactctcgactctccctaccccttatccacaattttaatgcggctactaccatcatgcgacttgatgatggccaattgctgggcaatgccttctttcatgtcgtccacatgactgatgacaccgaccattcggttttcaccaatttgttctaggacagagatggccttggtcagggcttctttatctagtgaaccgaacccttcgtcaatgaagagggcttcaacgacggcacccttgctggtattttgcacaacttctgagagggatagggcaatggccagtgcggcgataaaggtttcaccaccagacaaggatttaacggagcgttcactacctgtcaactggtcatagacgttgatatccaagccaaagtgatcacgcgcccttcgaccttcctcgctcaagacaaaggaatagcggttatccgttaataatccgatgtagttggcattggcatagtccaagatttgttggaaatactgacggataacatagacttcaagattgagacgaccagttagagcagtattttctcccttaaccaccttaaccaaatcactgagttcttggtgggccttaaaggcctcttgattgctgtcttgaaggttttttgctgcttgataagtagccgtcacatccttaagtcccttttccatgacagaaaactgagctaattgcatatcgtaactttcctgactggtttggacctcttgggttaaagcggccaaatctggtttttcctgattttggagaagctcttggcccttgacaatctgcgcctgcaattcttgtttaagggtttggtaacttgtcaattgggcctgaagcttaggaattgcctgcttgttcacctcaagcagccaaagctggatttgctctaggtcattggtgagcgccccttcggccttaagactttggtccaattcagccgataaacgcttcgtttcttggctggtcttttctttagacttgctcaagctctcaagttgccccttgatgccttgaatgtcggcatgaagttggttgtaggcttcaccattttccttgacctgcttattgtagaggtccaactcctgcttcgcaagggaaattcgttcttgatagagctctacagactccagctctggatgagcttcctgcaagtcttttaggagctccttagcttgatcgagagttgccttagcctcttgatagctcttagccaaatctgtcgctttttcttgggccttagctaactcctcttgacaatggacaaggtctgtctcttccttatcatagcgtttttggagttcttgataatgcttctcaacagtactcaacaaggcttgtccacggtcagcttcatagtcttctgaaaaatcaaaatcaaactgtcccttaacttgctcttcgagttcttgatagtgtttttcaagagttaacttaactttaaccacttggtcaagcagatcttggcgcttagtctcaacttcactcaatctagcctgacggtttgacaaggtagcgacttgcttttctttttgagcttgaagcacctccacctgattcatgagatccttcaaggccgcttcatcagcctgtgtcccatcgaccttaggatgatccaaggaaccacagaccatacagggctgtccatcctctaattctgcctgcaactgggcaatcatgagttgacgacgtgaagccaaagtcgttttcaacttctcttccaatcctttgagaatttcttgagcttggtcaatttccaaggatagcctttgatgacgcttttcggtctttgccaactcctgattcaagccctctatttctttcaggtcctgagccagttgcttatccacactgtagctcacagactggaggagtttttcagcctcatgtaaactctctaaactaagacgattagcctccaaatctgacaaggactggttaaggagctcaatctctttcgaagcctgctgataggtttcctccaactgcttgtagttagcactggactgtttgattttttcctgctcttgggcaagactctgggcatagataatagcctctttccaggcttccaacttctcttctttctgaagaaaatcctcagattgggctgccagtgcttctttttgagccttgacttcctcaaaagcctgctccttagcctttaattcttcttgagcgatttcaaggtcttgatctacttgtaagagctgcttctgatattgcttcaagctactaatggtttcctgcaacccttgggcaaactgcaattcctccagatgcgctttcgcctctgcctgttcctgagcaccttcctcaatttccagacggtaacgctccttggcttgctccaattcttgaaaaatctttgccacatcttgagcactctgcaaactcttctgtagcttagccaagtcctcatgggcatccttcaagatgcttttttgctcttcaagattttcttgacgttgcgccaaaagctcttcaagacgtgtcaatttttcagaagctggagtttgggctaagacatctaattcttcctcagaccaaacctgactggtaaaatggccatctagctgagcctggcgcttctccatatccttgttgctctgacgaagacgctcttccaaactcttttgaaaacggtcaaaaatacctgtcccaaagattttctttaaaatttgagtcttggtcttggaatcttctttcaaaaaacggctgaaatcattttgcggaaggaggataatctgtttgaactgctcggcattgagacccaaaatctgctcaatctggtcactcacttccttgatcttatctcctagcttttcaatctcctgaccaccaatcttatccacaatgactagagaagccgttgctttttgcatggtcgtgccaccacctcgcttggccctctcctgctggagaattcgctcaatgcgataaaggtggttgccttgttggaagtaaaaagtcaccttggtcaagtcatcctctggactagcaaaggtcgaccgcatctcctcgacattacgatcaccactagtcgtcgcaaacaaggccaccgtcatggcatcaaagagggtactcttaccagcccccgtgtccccaccaatcaaaaagaggggagcgtggtcaaactgggtgaaattgatgacttccttacgataaggtccaaaattggtcaattctaactgaactggtctcattgtccactccttccaatctcctcaaaaatactttccacaagagctgtctgtctctcagacaagacgtcgcccccagtcactgtctggtaaaaatcagagacaatttcctgcggcgactgcatttccaaatcttttaagtgctgatcgacggtcaggctttcttccctgacatcacccaaacgactgaaagtgatttctacaatatctgtcccataaatttcttccagacgggcacgcacattgataccctctaattccttacgactggacagttgaatatcaaaggcaaaccaagccttttgacaaggctgttccttataaaattcaggtgacatcaaggtttcaaaaggcgcctgcaaggtcaaaatcggccgtctgacctctaaagaatggaaggtctgagacaagttaccagtcgcatccaattcaagaatataaacacccttttcttccttacgtttggcttctttaacattaaaggcgactggactgcctgaatattgcacgcgcttggtcggactggcaaagcgtgtatggatatgccccaaagcgacataatcaaaagccttgaaaaggtcactggtcacattggtaagaccacccaccgtattactggtttcagacagcatcaattctcgaagactttgaccatcttggtcatctttcttagaaaccgcaaaatgcgtcaccaagatatgagccttgtcaggatcaaaggctttttccatatcctcaagaatgtaggccaaggcatcaccaatcccctgaatctctttatccccatcatccttataataaatccgagcatcaataggatcgataaagggaagaagaaaaatctgacaatcctccaactcaatcggctcaaaggcctcctccaaacgtgtgcttaaatgaagaccctgaggttgaaaaaagtctcgcccaaaatgcaagcgttcagccccatcgtgattgccactgatggcatagacaggaatctgctcctctaagaccaaacgtgccaaagtcttattaaaaagtttaatcgcatccacaggcggcaccgcacggtcatagagatccccagcaatgatgaccccatccacctgttcacgaattgccaaatccactatctgttggaaggcccactcctgctcctccagcaaagaccagccattgagggttcgccccacatgccaatctgacgtatgtaaaaacttcatgacagtctcctcattcgttttgtcttactctattgtaccttatcgtgctgaatactgcttaaaagattcacgaacattcggagctttcttgcatttcatctaaaagtaccaaaaaatctctcccgagcaattcactcgagagagattttatttttggaatttatgagagataaggtgtggaattcttagtcttggtttttacgacgattcatagccgcaagtcctgacatgagtcccataacaacaacacccattgctgcgaggttgttatctgactcacctgttactggcaattgttcgtcgccttctttagctttatcagaaccatctgccttcttaccatctttgtttccagatttcttcttatctgaacctttaccatctgaagcgccatcggctgctgagccagatccagaacctttagaacccttagatccgtttgaagttgctttgacagctttagatgttgagcttccagattgtccgccattaccgtttgatggtgttgagccatcttcgactttacggtagatgtaagtcacgactgtttgaccttctgtcatcttatctgtagatttaccttcttgacgaatcaattcgtatttcacaccgttacggtagatgtagcgatcaccatgaacatcaacctctgaaccaacagagttagtgattacaagtggcatcttgatttggttaccatactcatcacggtagataacgacgatagtaccaacttctttgttaactgccggtttagcaggttctgcgttaaccaccttgtaaacaacttttgtatcttcaccagggttgcttggtgtcacaccagtcttatcagccttgtaacctttcacttcaggaacgagtgtcatggcagccttagttggatcgttaggatcatttgtgtaagtaacagcttcaacacctgggattggattacctttttcgtcaacggcaataatcttaccaaatttagtgtaagtgacagtctcaaccttgctgtccatagtgacatcttgagaagccacacgacctttatcggcgaagtaaccgttaaccaacggtgtgatgacgaggtcaaacttagtcttatccgctttccattcacctgctgtaagaatatcacctgttacagagtcaagcgtcaatgaacgtttccattgtgctttttgaacactgtctgctggcaatttagcattgctatccttgcttgtatagtgaacagtgtaggtcacatctttaaggtaagcatccttagctggccattttggaccgtttggctggttaggatagattggagttccaggttcgtgtgcattgtctggattaaagtcaagtgctacacgtttgaagcttactgtccaggtttggtcaactgtgctatccaagtcaaatgttgcaccagctgggtaaccatctgttacaaggacatagccaaggtcttgataatgtttgatacgttcagctgttgaatagttaactgcttcgccagacttaccagccaaggcaacagtttcaagggttgaaccacttgtttcatcacggtatacaacacttgctttttggtcgttcttcacataaacaaccttagtatcgctagacaagtcacctggtgttgcaggtacaaccttagcagtgtaacctgggatagttggcaagttcttgtcaactgcaatcatcttagttggatcattaggatcattgatgtaggcagtatcagatacacctgcaattgggttaccattttcatcaacaatgacgaatttaccaaaggccttgtaggttactgtatcagttgcttctggagcatctggagtaactgtcttaccacctgctacggctttatcggcaaagtagccattcacaacaggaaccttaactgtaccgtaagtgtggctagtttcattccaagtcaccttaccagtcgcttggttatccttacctgcaaaggtatagtcagatttcacatctgtagctggtgttttatcgccagccccttggaaggtaacagtttgtttagtcgccttagtaacatcgttaacgattgctacgtaaacgacactagtatcttcacctggatttgatggtgatgcagggataactttaacagtgtagccaggaatgcttggaagcgtcttgtcgatggcaatcatcttagtcgcatcatttggatcgttcgtgtaggcagttgttgatacacctggaattggatttccattttcatccacagcgataaatttaccaaaggctttgtatgtcactgtgtctgttgcatttggtgcatctggagttactgtcttgccacctgcttcagctttatcagcatagtaaccaataacaactggagtcttaactgttccataagtgtgagtcgtttcagtccaagttgttgtattagttgtaggatcttctttaccgttgaagctaaagtcgttttgagtgttggcagctggtgtcttcgtatcagcaccagtgtatgtcactgtttgacttgttgctttagtgacatctttagtgtctttttccacgataatgtggtaacggtaacctggagctaggtattgaccaccaccattggcatcaattgaagcgtccaatccttgcgaaccgttggcaaattgaacaaggtcaacgacacggctttggttacggtcccaagtacgttctgaacggatagttgcaataccgttgttatagtcgtattgacgttctgacttcaagacatctacgtaagcattagctttagatttgtcagcagatgcatacttgatgcggtatcctgctggtactggtggaagttctgttacaccagcatcgtagattttattgtaagtcttaccgtttgctgtgattgtttcagttgagttattgatacggtatgttgaagatccaggaatcttgtttcctgcttcatcgacatagtcaataataccaaggttagcgtagttaacaacaaccatgtaattaccgtttgtaacgtagtcataaggtctcattactccacggttatcacgaccgactttgaggtggttgatgtaatcaatattaacaaagtattgttgacgctctggcaaaaaggcaagtttgtagccaaggtttgtcaagtcagggtttgttgagcctgctccagcatttgtcaaaacagcaaccgcatctgctgtacgaaggctacggtttgataccgcaagtcccatagcgttgatgagattttcagagttaagacttgcttcagcagcattcaattcactgcttgtcacggccaactcgctagtcgctactttaaggacgctatttacagcgttagttgtagactctgcacttgcagtttctgctgcagtcgcaactgaagcagccgcacttgtttgtgctgatacttgaccagcaacaggagtttctgctacagctgttgagctaagagcttgggcacttgtagctacagatgaagcagtcgctgttgcagactcagagctcgcttgtgatgcagcctgagaagctacttctgaactagctgctgtttgactagttgttgaagctgcttggctgtcttgagctgctgattgtggttgttcactagccaaggccacagtagagactgaacttggtgcgttttctgttgttgctggagctactgatgttgttggcgttgattgctccacgacgacatctggctcagcagttgtttccatacctgcggtagttggtgctaccgtttcatcagcttgggcaccctgtgcatttgagaagattgaaactcccaaaagtacagaggctacaccaaagctgtattttcttaatgaaaaacgttggcgtttattaaacatatctctcataataataaatttcctcaatatccaaattactttatatacagtttccattttatactataattattaaattgtcaaatatatactaataattgtgtaaaagtttaacttttattagaaaatattaatttaaaacttttatctaagtcctttgaaacttcaaaacgttcgtgcttttatttagcacaattccctattttgtcagttttataatttttaaaatacttttatatcaaagtgccttttattaaaaaccttcgtcactctaacgctattttttagttttggtgatatttattaaaatacaaaactctctcccttcaaaaagaaaacgttttaatggctcaacccacatctctctcaatcccttgccaatactgacctagaggctcctactacccgcattctcgacagactcaaaaatccctttggtagttaccaaaagagattccttcatctattatttgaaaatagaacttgtgaaactatctgtctcttgtaggagtttcttatagacagcttctttgagttttgtcgtatggcttgttgacacagatttattgccattattatctgttttaagacttgcagcgtctttggctactgccgctttaaacaaggctaacaaatcatcgtaagagcttactgatgtaccgtcaacagtaactgtcgtcaaaccatgagacgctttttctttgacttctttgaagtaggccttcttgaagtcttctagggagttgaactgaccatcagaaatcttgttaatgataaagtcatcaccaagggtgttcttaccagccgcttttgcttcttgtttatacttgttggtcgcataacctaagaagcctttttcatagccgtagtaaccccagagtctgaaggtattgtgcttgaaggacatggcacctggagagccctcgctggtattaccaccataaatggcagacatcataggcacattgacataggcagaagagaagtcctcaggtttataaacaccattgccaggtccacgattggtcatgaagttattatccacaaggtcatcaatagaagtcaagctaatagccttttcgctatcacttagagcacgcaccttgtcgtattggttcttactattgcctcgtagctgtttatcgaccttcttgaaccatgcgttattgagctcttgtttgccttgactgaggactgcttctccttccagcgaatcaagaagcatgagggtgtcgttgtagcccttcatgtaacggtcaatggcttcacgagagttcaacttgtttggattggtgttgtaccactgattaccatcattttctctttcaaaggccatgttgagtcctagagcaccgtattcaccctggtgaccttgagtcgctggtgattgtaacattccttgggcataggcttcaacgtctgttccttcacgacgaccaaaacctccaaagtaggcaatacggtcattaatatgagtcgtttcatgcgtaaaggctgaagcaccgtactcgctaatcatgttagacatgacataagtaaccttggcacgattatcatatggattgtcgtagatggcagcataggcaccagccatagctccgttatcaccgtaatactcaccgactggtccatagatttcacggattggcgcatagacttccgtactgttcttgaattgaccgtagcgctctggccaacctggccaaccatgaccccagacatagaaaccttcccagattggattgacaatgtctttgaacaatttgtttttgacattatctgcagccaatctttgccagaaatcaagatagttgatttgacgttgggccgctagatcaatctctggtttcaacttctctagggttgtgttgtacttgttagctgttccataagacatagtatcataggtagaaatcaagaacatctctgtcttatcaaggttcaacaaaggcaaaatcatcttgcggtggagaccacgactaaggttgtcataaacacgatacttgtgctcaccaacaccttcattttgagaagccttctctacaacgtaaaccttatccttagcggcatcgatgaaccaatcattcatattgtcgatagtggtaaagagttttcggttgtagttgaggaagtcggtgagatcactagaaagggtactcttggcgagaacttcaccaaaggcatcgtaggttcttgaaccactgatattattttctttagagccaatctcaatcaaacggtcaaggacatccacatttttaccatagaaatctggtttgaagagcatgatttctttgatattaacatcatcaaacttcacaccgtaataacgattcaagtaggtcaaacctagcaagagggctgctttattcttctcgaccttgtcaagaatcatttgttgggcagctggtgattggttaagctggtgatcttcattttgaaccagcttagtcacaagggtcgtcaaattagccttaacagcctcaaaactttcttctaagaagaggttcttgatagcattaaccttgtttggacctgtacggccaagtttttggtaaatcggatcagactgcaactcaatcggtttaaggatattaacgatgccattgataaggctcgagtggtctttttgaacgatgttaggagtatacttgatttctaaatcagtgacagtatattccttaacattgctcaacccttctgaactctctgaaagcttgaagtagtctttggtaccatcagcataatgaacaataattttattagcggcacttaggtcagtgacaaaattactgtcattcattggagttactgagagcacatctttagtgttcaagttgtgatccttagccagtttgtttgcttggtaaacaatataatccttgttatagaatggctggaatttctcaatattcttgtatgcctgcttgtatgctggattatagtcttgaatattggcaaaatctgcttgactagaagcgttgttaagggtgttcaacgcgtatggctcgctaacaaatgtatcagctgtaatcttgtaaccttcaacacgcttgtcagcttcttccttagtcaaatgtttgagttttttcggattcttggtatctttgcctgtgccatcttcggccgagctataaccaacaacgccaaagagatctttgatgtatggaccaccatcttcatcattgacatcatttgaagcaaagatttcttggcctttaataaccttggcataggtcacgttgtcttgaacagcaccgtatggccatgtcttagcgacaataccaccgacatttcgtgtgtttttgacatcaagaacacccttggctactgaattggtcaccttggccttagttcctgacttccaactgttaagcatgtaagtaacaaatggcactagcatacttgcattggcattttgagctgtaatggtcgcatcgacataggctctgttaacgaatcccatgtagtttgaaccagcaattccaccaactgtcgagttattaccgacagagtcaatcttaccgacaaaggcgacattctcaatcttgccatcttcatcaatcttattgacgataccagccacgtcattgttaccagtaactgaaccagtcaccttaacatcttcaatcagacctttatttttaaggttaaatccaaccgtcgcgatttgattttggccagggcgattgatatctacattttcaaagttgatgtttttgatagttccgccattgataacattaaacaatggatgctctaagtcatagatggcaaagcgtttgtcaccatcgctgagcaacttaccagtaaattctgtcgtaatgtatgatttgccgtttggaacgacgtgacgagcactcatgctttgaccaagtctaaattcacctgatggatttgcttgaatggcattgaccaagtcagcaaaatcatagtagacattggcttggctagccttaggtttctcaatgtaatagctataggtttgggcaaaatggttttgggcatcacgttgaaccaaattgtccgcttctgcagttaccttataaaccgccttgccatccactgttgtttcttcgatagctttcactgccaagtaagtcgtcttttgatccgcagaagtcagtttcaagtagtaattcgtgagatcctgaggcacagctgtcagacgagtctcatccacttctgtttgattgtcatacttgatcaaatctgtacgtgcaaaatctttaagctcaaccttcttgaaatccagttggagagtttggtctgccaagacctgactctcctcaccattgccacgatcaaaggtcatggttgttgtgagagtatatggcttgtaatagtctaagtttgttaaatcagcagtcaaggtcgtgctaggaatatcaagcgtttgaacaacttgcccatcctgcttgaggaccgccttaatagtcgtgatagctgctgaacctggattagtcaagttgtagctaagtttagcactgcgacccaaatcatccttgccaatctgtgtcagcgtaagcactggtttttcagataccttagttcctttgcgaacgatacgatcttggacaggcactagcactgtttcagtaacagttggttcttcagcagtcttgtttcccttataggtcttataaaccttggtgattttattttggcctttttgaccttcttggacaacctgtaaagtgcctttctcaagtgtgtcatcttcttggacaatttctttaaacggaagctctacaatagattcttcggtcgttgtgccatctagaggcttactgccacgacggatttttctaggttgtggcacctcaataaccttacctgacacaatagtcggctcaccaaccttaacaccatcaatggtttggtaaattttctggatttcttggctaccttttttaccctcttgttcaaccacttcttcatccacatacttgttatcatccgtaatcacttcgataggataatcgatggcttgcgtttcagtctctgtgatactgccgacaactggggtatgaacaggattctcaggttgaacaagggcctcgccttcgtgacctgattcttgtgtccccttggcttccagtttgcctgtatagtctgggttagcaggttgaacagctgcctcgccttcatggccggtttcttgagtaccattggcttccagtttacctgtatagtccgggttagcaggttgaacagctacctcgccttcatggccggtttcttgagtaccattggcttccagtttacctgtatagtctgggttagcaggttgaacagctgcctcgccttcatgaccaacctcttgcgtgccgttagcactgattgggcccgtatactctggattggcaggttgaaccaatgcttctccctcatggccaacttcttgtgtgccgttagcactgattgggccggtatattctggagccgctggttgaacccatgcttcaccctcatgaccaacttcctgggtaccattggcacttgtagtatcgctactgattgaaccagtgtactctggattggcgggttgaactagagcttcaccctcatggccaacttcttgtgtgccgttagcactgattgggccggtatactctggagccgctggttgaacccatgcttcaccctcatggccaacttcttgtgtaccgttagcactgactggacctgtatactctggattggcgggttgaactagagcctcaccttcatgaccaacttcttgtgtgccgttagcactgattggacccgtatactctggattggcgggttgaactagagcttcaccttcatgacctgattcttgagtgcctttagcactaattggtccggtatactctggattggtgggttgaaccactgcttcaccctcatgaccaacttcctgggtaccattggcactgaatgggccggtatactctggattggtgggttgaactagggcttcgccttcgtggccaacctcttgtgtgcctttagcactgattggtccggtatactctggatttgcaggttgaactagggctttgccctcgtgacctgactcctgactaccttttttccaactgattcccttactatccttatcagctgtcccctgactaactgtattatcttcttttattgaagactcaagtcctttgatagtattctccaaaggttgttcaagctctggcttagctgagtaacgcagataaccgacatactcataaccatcaattgtaataacacccttggccaaatctgcttcatttgaaacagtaagagtctgattataggcctgcaactccttgttttgcaaggcaagaacctctatgggaacaaggagactttgccctgcagccccaatcaagaccaaaccaataatttttttacgatgtttttttgaaaatagaaggacagccatggtcgctgttgccagtcctaaacctgtcgctgcccagtcagaacttcctgtctgtggaagagtagcttgactgtctccttttcgtttatagaccagataaaaagtatcatcattttgatattccttagggatagcatggaccacttgcttctgctcttcagctgtcaattcattttcagtgacataggccatgtgtaccgacgcatccgaagtaacctggtccgccgaaactggtttagacacgaaaagaccacctgctaacaagaatgtcccgatagcaactggccctacacctactgacaacttacgaatagcgtactttgtcactttttcaaaaacatgatttgcttgtttcattcaaaatcttcctatatgttaatccttgtaccccaaggcacgtcaaaaaaacgaagacgttattgaaaaaacacgcactctatacatttattaaccttcttccgaagtctatcatatcctttttttaatctttaagcaagcattttctctaatttttaatcaatataaaaaaacagttatgatgggtaactatgctcttatgaaaatcaacaaaccttttcatataagtgttttcattcatatcgctatttataggaatctttccctaaaatctaagtcgctaatgtctttttgaagaaggcccatcacctttcaatttttatctaattttttaatataaataaaaaacagtctcaaaacagacacaaaagagacccacccctatcgggatgagtctcttttttcgaaaactgagatagtctaactaactatgttgagggatttaacctaagaactatcttagtcttcttttttacgttttcctgctaaaccaagtccagccactgtcatcaaaccacctaatagagtagccaataatgatgtgttttcacctgtctcaggcaaagcttgcttagtatcagttgcagctggtgttgcttttgaagcgacatgaactgtatctgatgcaggagcaggtttatgcactgttggtactggagttgctttagtctcttgattgtcaaccgttggtgtattcttatctgcatctgtgcgtgggtctttaacgatgaccttaactggaacttcatctttagaaccgtctgggtatgtcacgacaacagtagcgtctttttcaccttcagtcgtagtatcaaccggtgtcttatactcgaatttagtaccttctggaaggtcgcctacgttgccaattgaatccttagcgtttggttgatcgcctggtttaaccgtttgatccttagctacaggtgtattcttatcggcgtcggtacgtggatctttaacgattaccttaactggaacttcatctttagaaccgtctgggtatgtgacgatgactgttgcgtctttttcaccctcagttgtagtatcaactggtgtcttgtactcgaacttagtaccacttggaagatcacctacgttgccaattgaatccttagcatttggttgatcacctggtttaaccgtttgatctttcgctacaggtgtgttcttgtctgcatctgtgcgtggatctttgacgattaccttaactggaacttcatctttagaaccatctgggtatgtcacgacaacggtagcgtctttttcaccctcagttgttgtgtcaaccggtgtcttgtactcaaacttagtgccttctggaaggtcacctacgttgccaattgaatccttagcgtttggttgatcgcctggtttgactgtttgatctttagccacaggtgtgttcttatccgcatctgtgcgtgggtctttaacgatgaccttaactggaacttcatcagttgaaccatctgggtatgtcacgacaactgttgcgtctttttcgccttcagttgtagtatcaactggtgtcttgtattcgaacttagtgccttctggaagatcacctacgttgccaattgaatccttagcgtttggttgatcacctggtttaactgtttgatctttagctacaggtgtgttcttatccgcatctgtgcgtgggtctttgacgattaccttaactgggacttcatcttttgaaccgtctgggtatgtgacgatgactgttgcgtctttttcaccctcagttgtagtatcaactggtgtcttgtactcgaacttagtaccacttggaagatcacctacgttgccaattgaatccttagcatttggttgatcacctggtttaaccgtttgatctttcgctacaggtgtgttcttgtctgcatctgtgcgtggatctttgacgattaccttaactggaacttcatctttagaaccatctgggtatgtcacgacaacggtagcgtctttttcaccctcagttgttgtgtcaaccggtgtcttgtactcaaacttagtgccttctggaaggtcacctacgttgccaattgaatccttagcgtttggttgatcgcctggtttgactgtttgatctttagccacaggtgtgttcttatccgcatctgtgcgtgggtctttaacgatgaccttaactggaacttcatcagttgaaccatctgggtatgtcacgacaactgttgcgtctttttcgccttctgttgttgtgtcaaccggtgtcttgtattcgaacttagtgccttctggaagatcaccaacgttaccgattgaatccttagcatttggttgatcgcctggtttgactgtttggtccttagctacaggtgtgttcttatcggcatcggtacgtggatctttgacgataaccttaactggaacttcgtctttagaaccgtctggatatgttacgatgactgttgcgtctttttcaccttcagttgtagtatcaactggtgtcttgtattcgaacttagtgccttctggaaggtcgccgacgttgccaattgaatccttagcgtttggttgatcacctggtttaacagtttgatccttagccacaggtgtgttcttatccgcatctgtgcgtgggtctttgacagttaccttaactggaacctcgtcttttgaaccatctgggtatgtcacaaccactgttgcatctttttcgccttcagttgtagtatcaaccggtgtcttgtactcgaacttagtaccttctggaaggtcgccgacgttgccaattgaatccttagcgtttggttgatcacctggtttaacagtttgatccttagcagtcggtgtgttcttatccgcatctgtgcgtggatctttaacggttaccttaactggtacttcgtccttagaaccatctgggtatgtcacgacaactgttgcgtctttttcgccttctgttgttgtgtcaaccggtgtcttgtattcgaacttagtgccttctggaagatcaccaacgttaccgattgaatccttagcatttggttgatcgcctggtttgactgtttggtccttagctacaggtgtgttcttatcggcatcggtacgtggatctttgacgataaccttaactggtacttcgtctttagaaccgtctggatatgttacgacaacaattgcgtctttttcgccttctgtggttgtatcaactggtgtcttgtactcaaacttagttccttctggaaggtcgccgacgttgccgattgaatccttagcgtttggttgatcgcctggtttaactgtttgatctttagctacaggtgtgttcttgtctgcatctgtgcgtggatctttaacaattaccttaactggaacttcatccttagaaccgtctggataagtgactacgactgtcgcatccttttcaccttctgtagttgtatctactggggtcttgaactcgaaggttgtgccacttggaagatctgaaacattaccaattgagttcttggcatctggtgtatcaccaactttaacagtttgatctttcgcagttggatcgttcttatcggcatccgtacgtggatctttaactgttaccttaactggaacttcatctttagaaccatctgggtaggtcacaacaacagtagcgtctttttcaccctcagttgttgtgtcaaccggtgtcttgtactcgaaggtagtgccttctggaagatcacctacgttgccaattgaatccttagcgtttggttgatcgcctggtttaaccgtttgatctttagccacaggtgtattcttatcggcatctgtgcgtggatctttgactgttaccttaactggtacttcgtcttttgaaccatctgggtaagtgactacaactgttgcgtctttttcgccttctgttgttgtgtcaactggtgtcttgtactcgaaggtagtgccttctggaaggtctgaaacattaccaattgagttcttggcatctggggtgccgccaaggttaacagtttgatctttcgctactggggtgttttcatccgcttgagttggatttgcgactacagtaaccttaactggtacttcatccttagatccgtctgggtaagtgactacgactgtcgcatccttttcacctgcagttgttgtatctactggggtcttgaactcgaaggttgtgccacttggaagatctgaaacattaccaattgaattcttggcatctggtgtatcaccaactttaacagtttgatctttcgcagttggatcgttcttatctgcatccgtgcgtggatctttaacagttactttaactggaacttcatccttagagccatctgggtaggtcacaacaacagtagcgtctttttcgccagctgttgtggtatcaaccggtgtcttgtactcgaaggtagtgccttctggaaggtcatcaacgttaccaattgaacctttagcatctggtgtttctccgatattaaccgtttgatccttagatacaggtgtattcttatcggcatctgtgcgtggatctttgactgttaccttaactggaacttcatctttagatccgtctgggtaagtgactacaactgttgcgtctttttcacctgcagttgtggtatcgactggtgtcttgtattcaaatgtagttccacttggaagatctgaaacattgccaattgaacctttagcatctggtgtttctccgatattaaccgtttgatccttagatacaggtgtattcttatctgcatctgtgcgtggatctttgactgttaccttaactggaacttcatctttagatccgtctgggtaagttacgacaactgttgcgtctttgtcacctgcagttgtggtatcgactggtgtcttgtattcaaatgtagttccacttggaagatctgaaacattgccaattgaacctttagcatctggtgtttcgccgacgttaacggtttgatctttagctgttggtgtattcttatctgcgtctgttcgtgggtctttaacagttaccttaactggaacctcgtccttagaaccatctgggtaagttacaactactgttgcgtctttttcacctgcagttgttgtgtcaactggtgtcttgtattcgaatgtagtaccacttggaaggtctgaaacgttaccaattgaacctttggcatctggtgtttcgccgacgttaacggtttgatctttagctgttggtgtattcttatctgcgtctgttcgtgggtctttaacagttaccttaactggaacctcgtccttagaaccatctggataagttacaacaactgttgcatccttctcacctgcagttgttgtgtcaactggtgtcttgtattcaaatgtagtaccacttggaagatctgaaacgttaccaattgaacctttagcgtctggtgtttctccgatattaaccgtttgatccttagctgttggggtgttcttatccgcatccgtacgtggatctttaacggttaccttaactgggacctcatctttagaaccgtctgggtaagtaacaacaactgttgcgtctttgtcacctgcagttgttgtatctactggtgtcttatactcaaacttagtaccttctggtaggtctgaaacattaccaattgaacctttggcatctggtgtttcgccaatgttaaccgtttgatctttagctgttggttcatacttatcagcatctgtttgtttagccttgatttcaattggaacatcaactgtttcagttgttccatctggatatgtcacaagcattggcacatttaccaaaccaggagttgcattggcagaagtcttactcgtgatagcccctgtattttcatcaacagaaacagactcaataccagctggaagcgtaccagctttgaaagttgtaccagaaggtacagacacttccttaccttcaacatcacggataagcggaatttgtggctgagttgtgtcgccagcagttacctcagatttgctgtaagtcacatcataagtttgattcttaggtgcattgacaatcaaaaggttagtatcaaggaaagcattggcataagaaccctgatgaaccccttcggtattacctttccagctacgttggatagcattcaagtttggtttaacaccacgttccatccattgctcaaagaggagcatgccgttatttttcttgatttcagcattcaatttcttagccaattcgactgaatcaactgtgtctttaatcttgtaagaaattgtatatgaaccaagttgtcctgaagctgttccaaggatatttttgtcaatataattacgaaccttatcaacatcactttgtgatggatttgattttgtcgcaatactaatggcatctgtattacgtgtatcaagtttccctgatgcatccatgacgaccttagttttttgaacaccacttacagcagagccgtccgcatcagatttgtaaatataagtttcgttcaaatcaagatatggcaagagactcttaggcagttcttgttcaatatatggtacagattggaaggtgtttgaacttaagtttacgacacccatagctgcagaaaccttcatggtataaaccaattcaattgaatctgcctttccatcgcttgtaaatcgtggaagcacttttagagttggttgtgtattcacaccagtaccaggagtacctgtgaaagcatttgtcaaaccattatctgatgcagtcttcttagcattacctgaggcaataaaccatgagttatcaatactttcacgaacaagtttattaggaataactttaccgtagtccttacctgtaatccatgcagatgagaatgacaaaggtgtatttgcaagaccaagatcgtttagggtcttgccatttttcaaggtaattgtgattgggtggtcataagctgccccaataccacctgaagctacggtatcattttgaatcggaatagaccaaactgaaccattttcgtaacttgtaaatgttttttccttaccttggtaagttggtttaattgtgattttttcaatattttcatagaaggttggattttggaagttcaaaatcatatgagctccaagagggaaagctttatccttagcccatccacccgcaagacgcgtccatgatgtaccagtaagagagatggtaccatcatcattgactttattaaactcaacaccagcgttcttaacaacgtaaggaggctccttatcagttgtgataccagtagtgtcaaacttattagtaattgtaagtgatgaatcactaggtttaataacaccatttacagtacttggtgatacaatcaactgtttcgtagcgtttttaccagacgcatctgtagctgttgctacgatagtaccacctgctgatggacgtttgaaggtgtaaacaccatctgccccgttaattgaaacttcttgaccatctaccgttactttaacagttgaagctgagtctgtacgaatagtgacatactcttcaccagcttcaatcgaagttgatacattcttagtagatgcttctgttgcagatgtagaagctgcagcaggaaccgcacgacgtgaacgaacgcgtggtttttccgcttcagaagaattagttgttgatgctgcctctgaagttgatgcttgtgcagtttcagaagttggagctgctgatgtgcttgctggtgcttctgatgttgctgcagcttgtgatgtagcgctctccgtagttgttgcaggcgctgttgacgtcgcaggcgttgcgacagtagctggtgcttcagcacttgttgcagctgttgcacttgcaacaggatttgtcactgcaggcgttgtctctgcgactgttctagtctcgactaaagacgccgtcgtttcacctgcttctgctactggcgtaatcggtgcagctgtcgtttcagtattttcatctgcttgtgcagtcccaccaatcataataagtgttcctagcaataccgaacaaaccccgatatttaatttgcggagagaaaagcgacttttcttctcattgaataaatctttacccatagttctccaaaacaattggaattctaactatccaattgcccttcctaaaaatttattctaatcccctttccattatgttatcaaaaaaatgtaaattttcaatacaaaatgtcataattttattattttctttttttataatcttctataatataaatatctactcacttaaatttaggtattacaatagttttataacccgttataaatactttttataagttatttcgtgatttttaaaaaattctatgagtttattcatacttatttttataaatattataataatcagaaaaaatatttgtcagattatttttagacacaaaagagactcaccccttatgggatgagtctctttttcgaaaactgaaatagtctaactaactatgttgagggatttaacctatgaactatcttagtcttcttttttgcgttttcctgccaaaccaagtccagctgccgcaaggattcctccgagagccatagctgccatagacgcatcatcacctgtttcagggagtgctggtcctttaggagcttctggtgtagttggtggtgtcactggtggaaccactggagttggaggagtcggtggtgttggtggtgttggaggagttggtggagtcggtggagtcggtggtgttggaggagtcggtggtgtcacaatattgttgaactcagtatcttctggcaattgagaagttactgtcaagactttaccgtctttagttactgaaacaacgactgtagcaaccatcttatcgtaggtaacagttgcatcgttaccttgtacttcttctactgtgtagacgtgagtaccttcttcaccacgtttgtactcaagagctgagaacttgatcttaccgttagcatcattgcttacagtttcgatcacattacccttgctgtctttaagtacgaagctaaactcaccagctttaagttcacgaccttcaagtttcttagtgaattcaaactcaaccttagttgggatattgactacacgtttttctgttggtttttctggtttttcaacagatttcttagttgggtcgtattggtgaacgatttgtgacgcagtattttcgatgtctacaccatctttagcagtgcctttgatagttgcaggaatatcgaacttgtagtagcgtccgaatgccaatttggcagtatcgatcacttgtgtgttttctgcatcgccaagtgacttagtaaggtcagctttagatgttgcagtaatcacaccgtcaacgatttggatatcgaacttagctgtcacatcttctcctgttacagagtcgtatgctttaatatcagcaacattgatgttcaagttttcgctgtcatatttatctgtaacacctacagattggatattgtgagcgtcagtgaagttagttgtgtcgagccatacttggtagacaaacttatcacctttcttgagtgtcttagtattgatattttcagcttcgttgttagctgtgctgtcagcgtaaggatccttgttagtatcgcctactttatctttcaactcagcatcatcgtcaacaagtttcataccagtgatatcgaatttctctttagaaacaacgtatttctctggttggaacttaggtttttctggtggacgaacagtgttattaaattctttgtctgctgggtcgttcactttagtgataagagctttcgctttaccatcatgtgagacttcaacagtaacaagagctttcattgaatcgtaagaaacagttccgtcagtacccttaacttcttctacagtgtagttgtgagtaccttcttggcctttcttgaattcaagagcagcaaatttaacgttacctgcagcgtcgttcttaactgtttgaaggatgtttccatctttatctttaagaacaaagctgaattcatccgccttaagttcacggccttcaagtttcttagtgaagttaaattcaacttcaactgggatgtttacgacacgtttttctgttggtttttcaggtttcttaacagtcttactttgtggatcgtattggtgaacgatttgtgaggctgtattttcgatgtcaacaccgcccttagcagattgtttaatttctgctgggatttcaaacttgtagtaacgtccgaaggcgaacttagttgtgtccataacttgtgtattttctgcatcgccaagtgacttagtaaggtcagctttagatgttgcagtgattacaccgtcaacgagagtgatatcgaacttagctgtcacatcttctcctgttacagagtcgtatgctttaatatctttaacgttaacagtcaagttttcgctgtcatatttatctgtaacacctacagattggatattgtgagcttcagtgaatttagttgtatccaaccatacttggtagtatactttatcacctttcttgagtgtcttagtattgatattttgagcttcgttgttatcagtcttatcagcgtaaggatttgcgttagtatctgcaaccttatctttcaattcgctatcatcgtcgagaagtttaactcctgtaagatcgaatttagattcgttaaggatgtatttctctgggttgaagtctggagtatctggaggagttactttgttgttgaactctttatcagctgcatctgtcacgttagtgataagtgctttagctgttccatcatgtttaacttcaactgtaacaacagctttcataccatcgtattgaactgtgccatcagtacctttaacttcttctactgtgtacttgtaagtaccttcttggcctttcttgtactcaatagctttgaacttaacgttacctgaagcatcgttcttaacagtttcgatgacatttcctgcttcatccttcaattggaagctgaattcgttagctttaagctcacgaccttcaagtttcttagtgaagttgaattcaactgagattggaacgctgtttacacgtttttcagttggtttagtagggatttctgtcttcttagtttgtgggttgtagaagtgaactacttgtccagctgtattttcaatatctacaccaccaggaacagagtctttaacagtggttgggatatcgaatttatagtaacggccaaaggcaaacttagttgtgtcgatgatttgagtatttgcatcgtctccaagtgacttagtgaagccatctttaaggttagcagtaatcataccattttcaactttgatgtcgaatttagctgttacatcttcgcctgttactgaatcgtaagctttaatagctgaagcatcaagatccaatttagtttcatcgtagtcatcagagataccaactgtttggatgtaatccttgttgttggcgtcgaatttagttgtatcgagccatacttggtaaacaagtttatcaccacgtttaacagacttagtatttaagttttgtttttcgttgtttgatgcatcgtccgcatatgggttcgcatttgtgtctgcgtacttgtctgccaactctttatcatcatcaacgagtttgtcaccagtgatatcgaatttctcttcagaaacaacgtatttctctggttggaacttaggtgtttctggtgggcgaactttgttgttgaactctttatcgttagcacttgaagcgaatccgcctgttgaagcgtggttaacgacagttgtgagaactttgccttccttagtaacttccactgttacagttgctttcatagcatcgtaagtgattgaagtatctttaccagctacttcttcaactgtgtaagtgaatgtcttaccaagatctgctttgctgaacaagagtttttcaaacttgatgtgaccatctttatcgttggttactgtttgaagaaccttgttgtctttgtctttcaatacgaagctgaactcacctgcagtcaactcacggccttcaagtcgtttagtgaagttgaactcgagtggaactggaacgttgttttcacgtgtttgagttggtttttcaggagttgtaactttcttattgaatgggttgtactggtgaattgtttggttggctgtattttcaatatctacaccgtcgttagcatcaatgtctttaacaacagctgggatatcaaatttatagtaacgaccaaactcaaatttagttgtatcgatgactggagtagcatctgttgcactaatagctttagtcaagcttgctttagatgtaccatagagaacaccattttcaactttaatatcgaacttgtctgtaacatccttaccagtgataccatcgtaaaccttgatttcagaagcgtcgatatcgagcttagcttcttcgtagttgtctgtgataccaactgtttgaaggttgctttctgcagtgaagtcacgagtatcaagccatacttgatagtagatcttttgaccacgtttgagggtcttaccattcaagttttggatttcaactttatcagctgaatcgtcgtcatcagcaagtttgttaccaatgatgtcgaagcttggttctgaaacaacatatttctctggtttgaagttaggagtaacctcgttatcgaagacacgatcgtcaccaccataagcatctccacctactgtagcgtaagagataactgttgacaattgatctcctactgaaggttggataacttgaacagtaacattgactttcatgttatcgtaagtaacagttgtatcagttcctttaacttcttctactgtgtagttgaatgtcttaccaagatctgctttagcatagttgatagtagagaatttaactttaccttcggcatcattcttaactgtttcaagaacattacctttttcatctttcaattcgaaagtaaattctttatcttgcaacttacgtccgttaagtgtcttaccgaagatcaactcgatagcagttggaacgttgttaacacgtttttcagttggtttatttggtttttcaacagtcttgcttactgggttgtagtagtttacaacttgagctgctgtattttcaatttcagcaccatcgtaagcaccgtcagtaaccttagctgggatgacaaacttgtagtaacgtccaaattcgaacttagtagtatcgataatttgagtgttttccgcatcgccaagtgacttagtgaagccagctttaaggttagcagtaatcacgccgttagcgatagagatgtcgaacttgtcagtaacatcagcaccagtcttaccatcgtaagccttaatgtctgaggctttaacttccaatttagcttcatcataatcatcagtgataccaacagtttggatgttatccttgttgtttgcatcaaattgatttgtatcaagccatacttggtagttgatagtttcgccacgtttaacagctttagtattgatgttttctgcttcgttttcacctacaattttaccatctgaaagtttcttaccttctgaaagatctgcatatgggttagcgtttgtatctgcgtacttgtctttcaactctgcatcatcatcaagaagcttagtaccagtgatatcaaacttaccattatctttgctaagaacgtatttctctggttggaacttaggttcttctggaggtgttacacggttgttaaattctttatccgcaatgtcgcctacagtcgcgataaggactttagctgttccatcgtgtttaactgtaactgttacattcgctttcattgtgtcgtatgtaacggttgcgtctgagcctttaacttcttctactgtgtagttgtgtacgccttcttggcctttcttgaactcaagtttagagaacttaacgttacctgatgcatcgttgcttacagtttcaagagtcttaccttctgaatctttaagaacgaagctgaattcgttagctttaagttcacgaccttccaaacgtttagtgaagttgaattctacttcaactggaacgttatttacacgtttttcagttggtttgcttggtttttctacagtcttgcttactgggttgtagtagtttacaacttgggcagcagtattttcgatgtctgaaccaccaggtacatcagctttaactgttgctggaatatcaaacttgtagtaacgtccaaattcgaatttagttgtgtcaatgatttgagtattttctgcgtcgccaagtgacttagtgaagccatctttaagtgttgcagtcatcacaccattttcaactttaatgtcaaatttatctgtgacatcagctccagttactgaatcgtaagctttgattgctgaaccatctacatcaaccttagtttcatcgaagtcatcagtgattcctacagtttgaacgttgtctttgttagctgcgtcgaatttagttgtatccaaccatacttgatagtagattttttcgccgcgtttaactgacttagtattgatgttttctgcttcgttgttgtctgttttgtctacatatggatcagtatttgtttcaccatatttatcagtcaactctgaatcatcatcaagaagcttgttatcagtgatagagaatttcgctgtattcaatacgtatttctctggttggaacttaggctcttctggaggtgtaacacggttgttaaattctttgtccgcaatgtcgcctacagtcgcgataagaactttagctgttccatcgtgtttaactgtaactgttacatttgctttcattgtatcgtatgtaacggttgcgtctgagcctttaacttcttctactgtgtagttgtgaacaccttcttgacctttcttgaactcaagtttagagaacttaacgttaccagccgcatcgttgcttacagtttcaagagtcttaccttctgaatctttaagtacgaagctgaattcgttagctttaagctcacgaccttccaaacgtttagtgaagttgaattctacttcaactggaacgttgttaacacgtttttcagttggtttagatggtttttcaactttcttagttgttgggttgtagtagtttacaacttgagccgcagtattttcgatatctacaccgccaggtacatcagctttaactgttgttgggatgtcgaacttgtagtaacgtccaaaggcgaatttagttgtgtcgataacttgtgtgttttctgcatcgccaagtgacttagtgaagcctgctttaagagttgcagtgatcacaccgttgttaacagtgatatcgaatttatctgtaacttctgctcctgttactgaatcgtaggctttaatcttagtagcgtcaagttccaacttcgcttcatcgtagtcatctgagattcctactgattgaatgttgtccttgttagctgcgtcgaatttagttgtatccaaccaaacttggtaaaccaacttgtcgccacgtttaacagtcttggtattcaagttttctttttcgttgtttgacgcatcgtcagcgtatgggttcgcattggtatctgcgtacttgtctgccaattctttatcatcatcaacgagcttgtcgcctgtgatatcgaatttctcttcagaaacaacgtatttctctggttggaacttaggttcttctggtggtgttacacggttgttaaattctttatccgcaggttctgtcacgtttgtgatcaaggctttcgctgtaccatcatgagatacagtaacggttacaacagcagccatttcatcgtaagtgacagttgcatctgtacccttaacctctgttacagtgtacttgtaagtaccttcttgacccttcttgtatttaagggctgtaacagtttcaccagctttatttgtgtactctactggagagaatttaatcttaccagctgcatcgttggttgcagttgcaatcacaacattgtcgctatctttcaactcgaatgtgaattcgccagctttaaggtcacgaccttccaatttcttagtgaagttgaattctactgagattggaacactatttacacgtttttcagttggtttgtttggtttttcaacagtcttgcttactgggttgtagtagttaacaacttgggctgctttgttttcgatatctgcaccagctacaacatcgtctttcactgttgctggaatatcaaatttatagtagcgtccaaattcaaacttagtcgtatcgatgatttgtgtattttcagcatcgccaagtgacttagtgaagccagctttaaggttagctgtaagaacaccgttgttatcagtgatatcgaacttgttagtaacatctgcaccagttacagaatcataaaccttgatatctgaagcattaacagtcaatttatccttgtcgtagttatctgtgattcctactgtttggatgttgtccttgttagctgcatcaaatttagttgtatccaaccatacttggtagtaaagtttagatccacgttcaactgacttagtatttaagttttcatcttcgttgttgtttgtattatcaacatatggattgttgtttgtttcaccatatttatctgtcaattcagaatcatcatcaacgagtttagtaccagtgatatcgaatttcgctttagaaacaacgtatttctctggttggaacttaggttcttctggaggtgttacacggttgttgaattctttatcagcagcatctgttacgttggcaacgattgctttagctgtaccgtcgtgtgaaacaacaactttaacagtggcaaccattgtgtcgtatttgacagttgtatctgtaccaggagtttcttctactgtgtagttgtaagtcttaccaagatcatcgcgaccgaactcgagagtcttgaagacaatcttaccagcagcgtcattcttcacgcgttcaacttcaacgccgtctttcttcaatacgaattcgaattcgttagcttgaagttcacgaccttccaaacgtttagtgaagttcatttccactggaactggaacgctgttgacacgtttttgtgttggtttttcaggtttttcaactgtcttacttactgggttgtaaacgtgaactgtttggttggctgtattttcaatatcagcaccagctttaacagattctttaacagttgctgggatatcaaatttatagtaacgtccaaaggcgaacttagtagtatcgataacagggttgttttctttatctttgataaattcatctttagaagttgcagtgattgtgccgttttcaactttgatgtcgaatttagcagtcacgtctgcaccagttactgaatcgtaggctttgatgtcagctgcgttaacgtccaatttatctgcgtcgtatgtatcagatacaccaacgtattggatgttattagcttctgtgaatttagtcgtatcaagccatacttggtataccaatttagaaccgcgtttaacagtcttagtattcaagttttctggttcgttgtttgcaacaccatcaacatatggatcagcatttgttgctgtgtactcgttaccaggtacatcatcatcgtcatccatcaacttgttaccagtaatgtcatatttttctttagaaacgacaaatttttctggttggaattcaggagtttctggaggagtgactttgttgttgaattctttgtctgcagtaccgtcagttgcgttaccgttagcgtctacgccaccagttgatgtaacgtttgtaacagtagtcaatgtgtgaccgttcttagcaacttcaactgtcactgtagctttcatcttatcgtaagtcattccgaattctttgttttcaggaatcacttcttctacagtgtaagtgtgggtaccaactttagtattgtcgaatgacaattctgagaaggttacgttaccagcagcatcattcttaacagtttcaacgactttaccagtagaatctttcaatacaaagctaaattcaccagctttaagttcacgaccagccaatttcttagtgaagtcaaacttagttacaactggagaaaccacatagttgttgaactctgtgtcttcaggcattgtaacagctgtactcaagagacctgtagcagcatctttagtaactttaactttcacttctgcgttcattgtatcgtaatcgatgtttgtatcgttaccagctttttcacgcacagtgtaagtgtgttcaccttcagtgctgtattcaatagcatcaaatgtgattgaaccatctgctgcatttttcttagtttgaataacgttgccgttttcaagcaattcaaactcgaaggcacctgcttcaagtgctttaccttcaagacgtttagtgaacttgaattgagcttgagttggagctgatgtgaaggtgttgttgaattctgtatcagttggaagagttgcaactgcagtaagtgcatgacctgacttagtaacagtaactgttacgttagctttcattgggtcataagtcatacctgcttcagttccttgaacttcttctacagtgtacttgtggtcaccaacttgagcatttgtgaatgtcaatgcgtcaaatttaactttaccgttggcatcattttgttttgtttgaatgactttaccatctttgtctttcaatacaaagctaaattcgccagctttcaagtcacgacctgcaagagctttgctgaagtcgaattgagcagttacaggagctacaacgtggttgttgaagatcttgtcgtcagtaccagttgcttcaccgcctgttgaagtcatttcagtcttagcaaccaaaagacctgaagcggcatctttagtaactgttactttaactgcgatagtcatttcatcgtagtctacatcggcattgttgcctttcacttctttaacagtgtagttgtagacaccttcgtggtcaaatgacaattcgctgaagttaattttaccgttagctttgttagttacagtttcattaacattgttatcaccagtcaatgtgaagctaaagtcacctgcgttcaaagtaccgtttgaaagtgatttatcaaattcaaggttaactttaaccgcacctggtgtgaatgtgttgttgaactctgtatctgctggaagagtgtttgttgctttaagaacgtgaccttccttagtaacagtgattgttacttcagctttcattgtatcgtaagtcatacctacttctttagttgcagggatcacttcttctactgtataagtatgagtacctactttagtgttgtcaaatgaaatttctgtaaaggttacagttccatcttttttgttggcaacagtttcaacttcttgtccgtttgcatctttaagaacgaatttaaattctccgtctttaagttcacgtccagctaattttttactgaagtcaaacttagtcttaactggtgctacaacatagttgttgaagactttatcatctgcgcttgatttgaatccaccttcagcactgtatttagtcgtagctactaaatcaccttgagcattctcagttacagtaacagtcatcgtaactgtcattgcatcgtagtcaacgtttgcatctgaacctggagtctcagtgatggtgtaagtgtaagttcccgctttgttaaatgttaatttgctgaatgtagctttaccgtcagctttgttagttacagtttcttcatgagctggaagcgatttatttggttgtacctcttttagtttgaatgtaaactcaccatttgctaatacacgtccttcaagttgtttttcaacttctggagttacttcaactggctcttgttttacatagtagtaaattggttgtttatatggtgttaacgagtttaataagtcaacgtttgtaccaataccttctactccacgttctaattgagcgttagctgaaccgtgtccaattccatctcctaagaatggtacgaatacagttttatatggtgtatatccagaagctgtttggaagttaaatggaacttctttaccattaggatattgtgtgactgctccagtttttggattagtttctgtatgtggaatagttgtaagaggtgatttcttaacagctaattcttgagtattagcttcacctggcttaattggtttagtttctgcgattaacatataaccatcagtacttaatgatccatctgaacgtttgctttgttgtcttggatctagcaagtaaacacgaataactactgaaccgtcttctccaactacttctttaatacgtttaataccataacggtccgcatccatgaatttagttccaactttgtaagggcgacttacataacctgatttgtcatttgcgtcagctgtttgataaagtttatatccatcgaattgacgttcaccagatgctgtgaaagtttgtccttcttcagctttaagagtatatctagctaaatctacttcattaccattttctttataatcttgaacagttttatctgttttattagcgttaaatgttggattatttttatcaactactttatagtaagttgttttattaattgtttctggtattttagcatttgaatcagtaattgtacgaccgttataagctggttcaacaacatttagaatgtctgttgtagtacgagcattataaactgcttcgtatcttttttgctcttccgtagtaagattgtgtcccggagctactaaatcggttatactctttccaacttcataaccattttgaataaatggttcagcaactttacctttggcagcagtacctgctttatagtctacttggaaagttaattcactattagatgctgctgttgtagtagtgaatttttgaattccactagatgaagtaatcgttcttgtttctaatacactaccagtcgttttatcaattaaatcaacagttgtatctgtagattcatcgaatctcttataggcacgtgcatagtattttgtaccataacgtttgttaaattcagttaaatcccaaatagcgtatgtatagtagtcgccatctttagcttggtaacctgatggtactgtttgcgaacgaacagttgcaccattaggatctgtcatgtctggagtagctttttcaccatctttaaggtaagtttctacagcaaccggctcgttattgtggtctgtagcggcacgacggttacgacggcggcttgctaccatagcaccagcatttgtacgttcctcatttgctcttgcaactgaagcacggtctacaccagcgcttgctacgttagcacgtgtagcaacatttggttgagcgcttgtaacttctgccgcagtttcggctgctgcagtttcttcagctactggagctgctgttgctgcagaacgattagctgctgtagttgaagcgtttgaagctgctgtcgctgaagctgttgtttcaacgttgttgctagctgcagctgttgatgctgctgttgttggcttagctgcttctgaagtagctttctcagttggttttgcagcctctgaagctggttttgctgcttcaggttttgcagtttctgtagcttgtttgtcagttgtctctgcggcagccttatctgttgctgatgcttctggcgtcaagttaaatgttgacgcagttgcatcagtagaagatacagctgcagtaggatctgcttgagctgttgatgctgtagacgtctcaaccaggtctgacgaactttcgccctcaactgatgaaccagggtttgatgaagaagcatcgggtgctatgacttcatcagcctgtgcagtatgagcagcaaagagtgccgttcctagcaagactgaagcgacaccaaacgaatatttacgcaatgaaaatcgttggcgtctgttaaaaatgtctttcatttcaagtctccctctgtatgaaatagttagttataggtcacgagtatacaagaatcctatacttgaactcatgattctattacattctaacattctgacaatttatggtcaagtgattaagtcaactttttaaaaaaaatcaagttgtctgacaattcagccaacaacttttgtttgttttttgcctttacaagtgtaaaacccttgattttatttgctttataccgttttcaaatttctattttattttcttttcattcctaattttctcatgtttttcacggaagatgctagacttatgagaggatttaactcattttattggctgattttcttacttttattctaatttttaccttcttattacaaaccatccgattctgtaacaccctcgataaaccattgatatacaatttaataattgcctttcacgactaaagtcacccactaccatttcaaaaaaataaaaaacccaagcatcaaatacttgagttaatcatcttattggttccagaagtcacttcctctatttttttctgatatggttgtcattccaagactgcaattcttgataggacttgactttcccttcttcctgagtcggtctaaaagccctaaccggtaactcgtaagcatcctgcccttcaggtgccatccaatggagcaaggtattgaaccaagtttcgttattaattttacttggaagcgtatagattctagcatgtttggtcttaacagcttcataggcttccttttgctctttggcaaagttggtactatccatattgaggctcctgtctttttcagaaatgtaataaagagcaggtagactagcaattggcgttccagacggattatcaaaatccttaccattagttgcacctggccacatctcaagaccaaaaggctctaaagtcttacgcatatcaacattagcgtactccaattccgagtccaaattattcgagttagctgagatattcatctcctcgattttttgagttttgagattgaggtattttttattagaagcaaaatcagctgacgatgcaccaaaaggcatttgtaagtaggcttggtcattaagcatgaaaagcattagacttgcctggtttaaataatcttcatccccagcttttttagccaatttcaaaaggtcaatttgtttaggtttctgatttggtttttccgtgtcatacacatagatattaaagtagtcatatttataaagagtttcacccttggcatttttcttaccagatacatcacccttgtactcttgagtgactaggtattgaccagctacccccacaatgttaaacatgtttctatcatgaccaggatttggtgtcacgagtagaaattccttattatccccgaaggttgtcagggtgattttaaataagggatcttctgcattactgccagaatagacagttgtacttgacttgctagaggaggctgaacccttggcagctttaccgctatcattcacagcaaaaaagatagcagtccctgcgattacaaaaaacaatgccactaagagacctataaaaacaatttttgttgtcttatcccccttaggtgttggcttctttacaaacttattttccataataatctccatttttagtattacttctagtatagcataggtgggaactattgataaggtgcataggcggtctaagaggcctggatttttgattttcatttgacaaaatccgttagacagcgtaaaatcgagacaagtaacattcggaggtaaatggagacatgaacaactaagtctattcacaataaacctgctttatttgatagattgttttcatgtcttttttgcgctctttttctgtagaaaacttgttgatggtatctgcgtttttttgcgtccactccatcactatctcctagagagctttttagctagattcatgacagttctatcttataaggtaggactgttttttgacctttgatattgtttgaagtaaaaacctacttcccatgaaacaatatccacaaacactctgacctaggaggtcctatgatacagattcaacacctaaccataacacataccaaggatttgcgtgaacttgttcatgatctaaatctaacgatagctacaggcgaaaaagtcgccatcattggggaggaaggcaatggaaaatctagtctccttgcccttctggtcaatccaaaagcacattttgaccatctgtcttacgagggaactattaacaaaacagatagcccacaggtctatattccccaacagatttcggatagcttgcaatctctaacccttaacgactacttctttgcggatacttatgacctagactatgccaccctctatcgtctggctgatgaacttcattttgatagtgagcgttttgctagcagtcagctgatttccactctgtcaggtggtgagaaactcaaaattcaactcatccgagaattagctcatcctcacgacatcatttttcttgatgagccttcaaacgatatggacttaactactatgacttggctaaaagactttatcaagcactctgataaaaccatagtctacatctcacatgacgaggacctactaagtcagactgcggataccattatccatctggagctgcttaaacgtcgtcgacaggcaaggaccagtgtggagcacctcgactatgataactatagccaacaacgcactgatgccttccagcaacaaatgcagcaagcgaaaaccgagaaaaaagcctatgacaaagctatggccaagcatcgccgtatcaaacaaaatgtccaaactaccctacgtaatacgcatgacagcacgcaaggacgattgcttgctaaaaagatgaaagcagtcctctcgcaagaaaaacgctacgaccgccttgcccaagacatgacacagatgcctgataaagaagacagtattgaacttttcttttctcatattgaccctctacctcaggggaaatatctcttaaatctggatgaaaagcagataaacatagctcctcacctgaccattgaccatctcaaactttctttgaaagggcaagaaaaagttggcattattggtgataacggctgtggtaaatccactctcttactctatctctaccgagaaacagagaggaaaacagacctgactatcggctacatgccccaacattatgacactatattgccactggatttgtctccaatagagtttttgagtaagactggcgacaagtctgaacgagaagttataagctcccatctcgctaacctcaactttagtcatgatgaaatgaaccatgcaatctctgatttatctggaggacagaaaggaaaactactcctactgcacctggtcttagaaagccctcagctccttatcttagatgaaccaaccagaaatttttcacccacctcacaaccccaagttcgacagctcttcgagaactacccaggggcaattctgacagtatcgcatgatgtcaactacctcaaacaagtctgccaaaagatctatcgtctagactcacaaggtttagaagaagttgagatttaggatatcaaatctatcgtttttgcaagaaaagtctcaaaagaaaccttttcttaaatcataaccacccgtctatgatatgatacctcttaagtagacaaggtaaatacctaaaatctacttaagaggtatttttatgtctagaagagaaaggttcaccccatacgagaaagaacaagcttgtctcgattatattaatggtaatcgttccagatctgagatatgtaactgtctccatatttccacaaggacgattcaagattgggctgccatctataaaaaatatgggattttaggattcacaaagaaaacaaaaaaccgttcctattcaaaagaatttaaaatggaacttgtagaaaaatgtattagtggtgaggcttcatctattgatttaggtcatcagtatgatatttcttcaggacttttaagaaagtggattaggatgtataatgccaatatagaacttaaggattacaatccaaaacgggaggtctatatggcaaaagcaagacgtaaaaccactattgatgaacgcaaagagattgtcaactattgtattgaacataatcgcaattataaggaaacggcatcactttatgatgtttcttatagccaagtgtattcgtgggtgaaaaagtatgatagtgatggtgaagaaggtttagttgacaaaaggggtcatcacaaactagatgatgaggttgatgaattagaacgtttacgaagagaaaatgtgcgcttaaaacgtcagttagaagaaaaggatatgactgttgaactcttaaaaaaagtgaaagaattcggaaggatgtgaggctaggcaaacagcgccacgaatcaaaatacttagcgatcgaagacttcaacaccaacaaagggtggagcattagctggatgtgtcatcagctcggcattacgaggtctgcattttataaatggaaacatagaatagttccagaacaagaacaattaaacagcgaaattgcggaattaattaaagaatatgacgaacgtttttcacacatcttgggataccgaagaatgaccgattggatcaatcatttcaatcatacgaattactcaagaaagagaattcaccgaattatgaaagtactcgatatccacgcttttatccgtaagaaaaggaaaaaatacaagactgccaagcctaaagaaactgcagaaaataagttggcaagaaacttctatacaactgctccgaacaaaaaatgggtaacagatgttacagagtttaagattcctaactctcataagaaactctatcttagtgtcatacttgatttatatgaccgctatcctattgcttttgtcataagtggtcgaaatgacaatcggctggtcttcaaaacatttgacaaagccattgaaaaaaatcccgcagcgaagcctatatttcacagcgatagagggtttcaatataccaataagaactttcaaaaaaagctgaaagatactgatatgattcaatccatgtcaagagtgggccattgtattgataacggaccaatagaaggtttttggggaattataaaatcggaaatgtatcagatgtatgagatttcagatgaggcctccctccgatatgccatcaaagactatatccgattttactgtcaagagcgtccacaaagtaggtatgactgtaaaacgcctttggcagtaagaaacgctgccttatcatcagaacatcctttgtcatacccaatcgctaagaataacaaaattgaaaagtacaagtctaagtggtctgcataaaaaaacagccgtacatttattatgtacgactgaccttcaaaaacagacacttttttagatatttaacctgtctacttgacagggggcatatcactaacgggtggtttgatcaagggctataagcccataataccagccagcgcctaaagacgctggctttcactttgttcaagccttattgcttttgactcgtcacaagcctctcaaagaggcattcgcattacttaccattatccctgaagggattttcatattcttttacgcttaatttgtccaaagcgatatcatgcttctcttgttcctgaatatatttcttaattgtggcttcattaagtcctaccgtacttacataataaccttctgcccaaaaatgtctgttaccaaatttatattttaaattggcgtgtttatcaaacatcatcaatgcacttttaccttttaaatatcccataaaactagctacactcattcgtggtggaatacttactagcatatgaacatgatctggcattaagtggccttctattatttcaacgcctttatattggcatagtctatgaaaaatctctcccagactactcctatattgattatagattatttttcgtctatacttaggtgtaaatacaatgtggtacttacacatccattttgtatgtgataaactgtgagctttttgcaccatagtcttaactcctttcgttttacaattggcttgaacacctatattgtaactcgtttggagtttttttgttatgacggtataaccttcgatgcgcacccgcatagcgggtggtttatttgtttcgcaccttgggagcgaaacggacttaaagtcacataaaatgaaaaaactcaggcaaaacctgagttttttagtcttaatcaatttcaagaccaccagtatagagtcggtaataagtaccaccttgctccataaggctatcgtggtcaccacgttcaatgatacgtccgtggtccataaccatgataacgtcagagttgactatggttgaaagacggtgggcaataacgaagaccgtacgtccttccataagtcggtccatcccttcttgtaccattttttcggtacgagagtcaatagaggatgtcgcctcgtcaaggataagaaccggtgcattggcaagggcagcacgcgcaatggcgataagctgacgttgcccattagacaagcctgcaccgtcatctgtaagaacagtgtcatacccattatccaagtgttgcacaaaggaatccacgttagcaatacgggcagcttcaagaatttcctcacgtgtcgcatcggcacgaccataggcaatattttcagcgatagttcccgtgaagagatgggtatcttgaagcacgataccaagtgagcgacgaagagaatctttttcaatcaacttgacatcaataccatcataagtaatcacacctgattggatgtcgtagaaacggttaatcaagttggtaatcgtcgtcttaccagcacccgtcgcacccacaaaggctaccttttgccccttgtctgcataaaggttaacgtcatgaaggatttgtttcttaccatcgtaagagaaatcaacgtcttggaagaccacatttccgaccaactcgaccaattcgtagtcgccatttggacgtgggtgtttccaagcccagagattggttttcttgtctgtcacaaccatctgaccatctaccaattcgtagttgaccaaagtgaccttaccttggtctacttcttctggctcatccaagaggtcaaagatacggtcagcaccagcaagtgccataagaacaaagttcagttgttgagagacctgagtaataggtccgttgaaggaacggttcaattgtaggaaggccatgagaccaccgatagtcaaaccaccgacaccattaagggcaaagagtccaccaaccaaggcggtcaaaacaaaggaaacatttcctaagttcccaagaattggcatgagaacattggcatagcggttggccaagtaagaagattcaaagagttgctcgttaatcttgtcaaaatcagccatgctttcttcttcgtgaacaaaggccttgaccactttttgacctgacatcatttcctcgatgaaaccattctcaatccccaaattcttttgttgttcaccgaagtaacggcctgatttggctgatacatttttgatgaccataaacatgatacctaccatgactaggaccacgataaagaggagaggactaaccgtaagcattgtcactgttaccccgataagggtaatagccgtttgtagcaactgtggaatggattgctcaacagcctgacggagagcatcgatgtcgttggtgtagatagacatgatgtcaccgtgttggtgagtgtcaaagtagcgaacaggaagcttttgcatacgagcaaagagctgattacgaagggaacgtagagaatcttgcgaaatcgtcgccatgaggagtgatgacacatagttggcaatcacaccgataagacagaagacagccactgaagtcaagaaatgtaaaagcggaccaaagtcatggctaccagatttgagcatgggttgaacgtaaacgtcaaccaaggactgaatagaagccgtcaaattgaccgttgccaaggaagcaaccacaataaggacaaaggcgatagaaagcgaaagtttgtagtcttgccacaaaaagcgtagaagacgtgctagagagccccaattagcttttttcttattctgcatctgctactcctttcccttgtgtttgcatcttgtagacgtcacgataaatggcattgttagccaccaattcatcgtgggtaccaatagcatcgatacggccatcatccataacaacgatgcggtctgcatcttggatggatgaaatacgttgaccaatgataatcttagtggtgtccttaagacttgatgccaaaccttgacgaatcaaactatctgtcttagtatcaaccgctgacgttgaatcatccagaatcaagatttttggattcatgaggagggcacgtgcgatacagagacgttgacgttgtccccctgagacattggctccaccacgttcaatcttggtgtcatagccatctttaaactcttgaataaattcatcggcttgggcaatcttacaagcttcaatgatttcttcatctgtcgcctgtttattcccccaacgcatattttccttaatggttcctgagaaaagaacgttggtttgaagcaccatggcaacttgcttacgcaagctatccaaatcatagtccttaacatcgcggccagcaaccctaacctgaccggcttccacatcataaagacgaggaataagctgaaccaagcttgatttcccagaacctgttccaccaaggataccgataacctcaccagacttaatctcaagcgaaatatctttgaggacatgggtcttgtcaccattttcatcagtgtatgagaaatccacatgatcaaagctgatagaaccatctgtgacttctgtcaagccattttcaggtgaaacaatagtagattcagtattaagcacttcattgatacgctctacagaggccatagagatagacaacatgacaaagatcatcatgaacatcatgagtgagatgaggatggtcatggtgtaactgaacatggaagtcaattcacctgtagatagcttgccgacaacgataaggtgagcaccaaaccaagaaatcatgaggaatgatgcatacatagacaacatcatggctgggttagacatgacaaccacacgaatggcacgcatgaacatcttgtaaatacgacgtgaggccttcttgaatttatccgtctcttcctgctctttaacataggatttcaccacacgcatgttggtgatgttttccttgatactgttgttgaggttgtcataagcctcaaacacttgagtaaagagagggtatacgattttggtaataatggccaaaaccagaccaaggaaaagtgtcacaccaacgaaaatccaagccatttcaccattaatcaggaaacttgctgcaatggcaaagatcaagttaaggggtgcacgtacacagatacggataatcatctggtaagagttctgcacgttggtaacatcagtcatcatacgtgttaccaaaccaccagctgagaacttatcgatattttcaaaagagaaggtttgaacctttttgaaaatggcctgacgtagattcttagcaaatccagcagaagcaaaggccgcatagcgtgccgactgcataccgcagaaaagcgacaggaaggcacagaccaacatgaggccaccatagagccaaatgttagacatgttagattgctggacacctttgtccaaaagattggccatgacaaagggaatggaaatctcaaacatgacttctagcgtcatgaagagagacgctaggattgagggtttcttgtattcctttatctgggcgatcagggtttgaaacataattacctccgtttttattctttttctttttttcttttgatatttttcttttttgatgctttcttaagtgatggcggacgtcagcgaccgactcagtcgttccatgactagttatcgagccaaagtctcgataactccgcttcctataactgcttctgcagttataggaatatcatcacggcgaaagcatcgttattgggcagagcgaactgtcgaatcgtgagcaattcggacaagtgcaaatagattcaggatgagccctaccacgacgaaaaatatcgtctgctctgggcagagcgtgtttcatgcattgatagatatacaccatttttgtaatctatcacggcgaaagcatcgctgttgggcagagcgaactgtcgaattgtgagcaatttcgagcaagtgcaaataggttcagaatggtctcgaccacggcgaaaaatatcgtctactctaggcatagcaaagcttaaaactaagagtcttatgcttatcatttatctataaaagaacggtcatacccttttgagagcatacaaaagcccctgagggcagaccctagggattttttcgttctcatatatatgtcattagtataggttaaattgagtaaaattgcaagtacaatgtcatttcactaacatttgtaagcattttacgatgtttgataaaaaaatcgttctaaaacctgctcatttttcccaaacttatcataaatgttcgtaaattatcgccatacgtagcagaaatttgttttctgttcctatttataatagactaacactaacattagatgaaaaggtgactctatgactataaatcaactgcttcaaaagctggagcctaccagccctatccttcaagctaactttggaattgaacgcgaaagtcttcgtgtcgatagacagggaaaattagcacatacgcctcacccttcttgcctaggagctcgaagtttccacccttatattcaaacagatttttgtgagtttcaaatggagctcatcacaccagttgctaaatctaccactgaggcccgtcgttttcttggagccattaccgatgtagctggacgttccatcagtaaagatgaacttctctggcccttgtccatgccacctcgtatcaaggcccaagaaatccaagttgcccaactggaaaatgaattcgaacgccattatcgtaactacttggctgaaaaatacggaactaaactacaagctatctcaggtatccactataatatggaacttgggaaagatttggttgaggccctattcaaagaaagcaaccagactgatatgattgctttcaagaacgccctctatctcaagctggctcagaactatttgcgctaccgttgggtgattacctatctctttggtgctgcacctattgctgagcaaggtttcttcgaccaagaagtgccagaacccgttcgttccttccgtaacagtgaccatggttatgtcaataaggaagaaatccaagtatcttttgcaagcctagaagattatgtctctgccatcgaaaactatatcgaacaaggagatttgattgcggagaaggaattttactcagctgttcgtttccgtggacaaaaagttaatcgctccttccttgacaagggaatcacctatctggaattccgtaacttcgacctcaacccctttgagcgtatcggtattagccaaactaccatggataccgtacacctgcttctcctagccttcctctggatggatgcccctgaaaatgtcgatcaggctctggctcaaggtcacgcgttgaatgaaaaaatcgccctctctcatcctttagagcctctaccttctgaagctgaaactcagaacattacgacggctctggaccaactggtgcaacattttggactaggtggctatcatcaaggtttggtcaaacaagttaaagatgcctttgctgatcctagtcatacactagcagcccaactcttatcttatatcaaagacaagtctcttgctgactttgcccttgacaaggctcttgcctatcatgattatgactggactgcccactatgctcttaagggttatgaggagatggaactttctactcagatgctactctttgatgccattcaaaaaggaatccattttgaaatcctagatgagcaggatcaattccttaaactctggcataaagatcatgttgagtacgtcaaaaatggtaacatgacctcaaaagacaactatgtagtacctcttgccatggctaataaaaccgtgaccaaaaaaatcctggctgacgctggtttccctgttcctgctggcgacgaatttaccagtctggagcaaggtctagcctactatcctcttatcaaggacaagcaaattgtagttaaaccaaaatcaaccaactttggtctgggcatttccattttccaagagcctgccagccttgataactataagaaagccctcgagattgcctttgcagaagatacagctgttcttgttgaagaatttatcccaggaaccgaataccgtttctttatcttggatggacgttgtgaggctgtactccttcgtgtcgctgccaatgttgtcggtgatggcaaacacaccattcgtgaattggtcgctcagaaaaatgccaatccattgcgaggacgtgatcaccgctcaccacttgaaatcattgcgctaggagacatcgaacaactgatgttaacacaacagggttacaccccagatgatattctcccagaagggaaaaaggtcaatctacgtcgtaactcaaacatttctacgggtggtgactctattgatgtcactgagaccatggattcctcttaccaagaactagctgcagctatggcaactagtatgggcgcttgggcttgtggggttgacctcattattccagataaaacccaacctgctagcaaagaaaaccctcattgcacctgcatcgagctcaactttaacccttctatgtatatgcacacctactgtgctgaaggacctggacaggctatcacttcaaaaatcttagacaagctttttccagaagttgccacaaatcaaaactaaaacttaaatcttaggagcaaacaaatcacctttatctcgagataaaggtgattttgctttattaaccaaactctcctgcttcttcctcaggatgagtttccatgtactggatgtgttgtatataggcatcttgagcctgattgaaggcttcctgattactgtaaggataatctatgtaaaagaggtcccgccagccattcaaggtttggctattgtagaaaccttgaatctttgtgggaagaaactctttgttgtagctgatccgcagcttgagtagggtcttatcctgaaactgagtgatgatactgttggaggtttcttggccttccagactagtccaaaccttattcagaacaatgtcctgactatagtgattagccttgacgcgatttttgtccactgggagcttctgggtagcctctaaaaggtaggacagctctccttgaaaataagcctcaatggttaaatccccaagactggagccatataataggccatccttaatagcaatgtttgatccaaaaagtctttggccagctacatcaaaggacatcccctcatcctgtccgtagagcttaatggcataggcatcccttactcgatagaaattcttagcgacaaggacactatcaaggttttcagtcttttttgtctccaccttggggcttgtaggtttcttggtaaaagctgtcaaacccattaagcacaagatgagagcgaatataatcaaggtaagcattgtagacctggagccggtcttcagctttaacttgtctccatgtttcaaggtctttcaagcctccttttttaacaatatcagcatagcgcccaccgtttaagacattcttgggatttttccacttcctaaccatcttgcgtctaatcgcattgtcagcaggatgacgaacgtcaagataggtatggctattattgagataggctggtaggtcagcattcaatcccttagacagcgcataattagcagaatccgtatcggcaatgtcagcaccgtcttcaatcttgtaatgcttgggattggagtcgatgctaccgtctttccttttcttgtagacattccactcagagacaaatctccccgtatccatattgacaataaactcaataaaacgggaattgctaactccataaggtcccatgacactggtctgaggtagctgaattttcatgttctgcggataggtaaagtctcccaagcttcgattatggtaggaagcacccgtagtgtaatccaaatgaatcttcttgtccttgctgtaggccagaagtttgtctaaatctgtcttgcccttgtagttggtcctaatatagtccatggactgcttatcaatccaagacctaaaaagatggagcttgatacctaagtcatccaccccaagccctagatccgtctgataggtctccataatagcctcacggaagtaactataaaaaggactggttggctctagcttcttggaaaatttataacctgacttccctaactggaggaactggtacttgtccacataaacctgcatgtgctccataaccaaattgagcttgtcatgattagggagttgagatgcttggaaaaaggccgtataggtatctgagcccacttccttgctttcttggtcaatgtcctgtaaaaccttgtctaactgggtcaaggaagtctttttcatcttgcttctgacctgagccacataggctggcttaatgccctgatcccagtggtcacgagccataatagcatttgccttctgtgaaatcaaggtcaatcgtttttgataagactcgtcctccaaggccagcttcaaagcctttgatggtgtcgcttgaaccacagataaatcaccgtagatatctgcctttaggacaagatttacctgcatatcataggaatgattgatatggagaacgaggtaaattttcccgtcttccttcctaacagacaaagcatcgagttgataagattggataaccccagcctgactaagtgccagtttatctatattttccaaagaatcctgatagatataggaaatctcagggtctttgaccttctttaccaaagagtcatttcgctgtcgattgaaaaccacaagaccaagtatgaggattacagccagggcacttgccagatactgtaaaattactttcttcatagtacttccattatagcataggtggacaaaatattctgaaaacaattggcaaacgttgaaaacaaatgaaaaacaggccgactaagacctgttcaactcaattttttataaatcgctcaagcgacgatgtttaatactaaaatcaaaataagcattttcctgaagtttgtggaatatgtctctgtaggctttttcgtcaaagtgatcgccacgatagagaatctcaaaactcaaaccttcgtattccaagaaggcattagaagtcttaaaaccattacgcttatagaaatcccaacgcgccgcacgttgctcaggattgtcgttaggttcatccaagcgctctacttccaagaccatagaacgagatggcccataaaagtccaccagtttatcaataatctcacttccgtagccatgactccgcatttgaggtacaatggcaaagaaactcacataaaaaactttggcattgtagagaactgaggcaaatccaacaaaatcatcctcgtcataaaaggcaaagaaatgataatcatcacgaccatccaattttaagaagtcacttaatggaatacgttcttcttctggaaaggcctcgttgtttaagcgctctaccctatctaaatctggaaactccttggtaattaattggctgcgtaaagccataaattccccccctttttgatgcttatacctataggtcattataacatcttgataagcaagtgcaagtttcaagggctaagatagatctacgggtaaactcctactgccatgtataaatactacttagatctctccgtcacctctcttcttaaaaaataaaagacaacgaccatttctagtcgttatctttttgtgattcataagctatcgcctattttttcaattcccaaatttctttagcatactctgtgatcgtatcatctgaagtgaatttgtgagatttagcaatattagctaagctcatacgtgcccacttgtcatgatcacgataaagtgcatcgattttctcttgagcttctacataagcagcgaagtcttccaagaggaagtactcatcgttgtgggtgatgagggcttcgtaaatttcagtaccttcagcttgagcatttggaatcgtaccgttaacaaaggtatcaacgacacggcgaatgactgggttattttcataaactgcacgagagtagtaatcgtgacgtgcatagtgttcataaacttcgtccttgtccataccgaagatgacaacattctcatcaccaacttcatccttgatttcaatgttggcaccgtcaagtgtcgccaaagtgatagcaccagttatcatgaatttcatgtttgatgtaccagatgcttctttagaagccaatgagatttgctcagatacatctgctgctggaatgataagttccgcaagactgacacggtagttttcaaggaagaccactttaagttttccttggagactttcgtcgttgttaacaaggttggcaacttcgttgataagtttgattactgatttagcgaagtgataaccaggggcagctttggcaccaaagatgaatacacgaggtaccatgtctttatctggattatctttaagatcccaataaagtttgatgatgtgaagaagattaagcaattgacgtttgtacgcgtgaagacgtttcacttgaacatcaaagatagcatctgtagacacttctacgcctgttgttttcttgatatagtctgccaaacgttgtttagcagtcttcttaacttgatagaactggttcaagacttccttgtcatccaagtaagttgtaagattttcaagctcatggatgtcgttacgccaaccgtcaccaatcacgtcatcaattgctgctgaaagttccggagctgcaatttgtgtccaacgacgttgaacgataccatttgtcttgttattgaatttttcaggataaatagtatagaaatcgtgaagggtatcttctttaaggagttctgtatggagtttggcaaccccgttgactgagtgaccaccaatgatagccaagttagccatgtggacttggttatccttaacgatacgtgtgcgttcgataacatccgcagcaataccacgtccagccatttcagcaatgtaacggttgtcgacttccaagatgatttggtaaacacgtggaagaacacgtttgaagagctgttgatcccatttttcaagggcttcttgaagaatagtgtggttagtgtagctcatagtcttaacagtcgcattccaagcatcttcccatgaaagaccatattcatcaaggagaagacgcataaattcagctggtgcaaccgcagggtgggtatcattgatgtgaacagatactttttcgtggatatctttcaatggcaagcccatcttgaggtaagatttgatgattgtttggagaccggcacttgtcatgaagtactcttgaaccaaacgcaattctttaccttcaattgttgaatcatctggataaagaatagcagtaatatctttcacacgacggcgtgcttccaatgttgggtaatccaactcatattcttcaggaatttcaacatcccaaaggcgaaggttgttaatcacaccattttggtaaccaatttgtggcacatcgtaaggtacagcacgaaggacttgagcgttcttataagttgggacaaagcgaccatcttcattgctttcaaggacaacatcaccaaagagtttcacatagacaatatcgtggtctttacgtgtttcccaaacatttcctgttgaaccaaaccaaccatctggtagttccacttggtaaccatccacaatacgttgtttgaaaagtccgtaacggtaacgaagaccattaccaaaacctggataaccagtagtcgcaagtgaatccataaaggcagcagccaaacgaccaagaccaccattaccaagtgccatgtcatgctcagcttctacaacttcacggaagtcaatatcaagttctgcgaatccctctttaacaaggtcaagaataccaaggttgagaaggttagtttccaacatacgacctggaagaaattcaatcgagaagtagtaagcaatcttttcttgattatctgaaagtgcatggttacgttcaatccatgtatttgtgtaatatttacggatcaaaccagccaaggcagtaaaaatctccgttggtgtggccttagcaactttaatcaactgctcttgatggagagtatccttaaagtcacggatgaattgttcttttgttaaattttcgagttgcatagaaatcctttcttactacttccttatcttcaatacacttcttacaggtatctattcagataagagggaattagaaattttactcaaacttccaaaccttgccagacaagattcgaaacagacatttcaaaatctttatttacaaaactgtcaaaacagccaattatattataacatgattagagttattcttctattcagacttttagacgctttctctataatctctgccaagcaaaacttagggactaaataattttagaagcgttttcaaacgctttacacgaagataacttttcccttgcgagaaaagttatctttggaattatactaattgtttgtacaaatcaacatatgccaaacttgctgtatcccatgagaagtcacgtgtcatcgcattgtgctggagttgcttccaagcatcagcgttgttttcgtaaacatcgagagctttttcaagggtttgaaccatccagtaacctgagaagttaccaaatgagaatcctgtacctgagcctgtgacagggttgtaaggttcaacggtgtcacgaagaccaccaacctcactaaccactggcaaggtaccatagcgcatagacatcatttgagagaggccacatggttcaaaggctgaaggcataaggaaaatgtcacaaccagcataaatttgttgagccaactctaggttgaaagtaatgttggcagacattttctctgggtaggcatgagcgaaccaagagaaagaattctcatagtcactataaccagtacccaaaagaacaatctgaacatcatgttgcaagatgttgtgaagctcgttaaccaccaaatcgaaacctttttggtctgtcaaacgtgacacaataccaatcaatggaacgtcttctcgaactggaagaccaacacgctcttgaagcgctgccttgtctttggctttacctgacaaatcatccactgagaaatgataaggaatgtgagtatctgtttctggatcaaggaggtccgtatcgataccattaacaataccagataacttaccagattccatgcgcatgatttgatcaaggcctttaccaaattcaggtgtttggatttcaccagcatatgatggtgaaactgttgtgacacggtctgcgtaaagaacagctgctttcatccagttgaggcaatcattccaacgaagggtaccatcagcataacgctcgtaaccaacaccgaaaatttcccaaagcattccactgtcaaattgaccttggaattcaatattatggatagtgaagactgtcttaataccttggtaagcttgaatccaatggtatttttccttaagaaggaaaggaatcatggctgtgtggtagtcatgaacatggagaacatctggaataaagtccactttttccatcaactcaagggcagccatttggaagaaaccaaaacgctcaccatcatcccactcaccgtataccgtaccacggttgaaatactgctcattatcaatgaagaagaaagtcacaccatcacggacaattttcttgatgccgacatattgacgacgccaaccaacatttgtatagaagaagccaaggtcttcaacctgatcgccaaatttagccgaaaccacatcataatatgggagaattacggcaacctcgtgaccatttttgactagagatttaggaagagcaccgataacgtcacccaaaccaccagttttagcgaaaggtgcaccctctgctgctacaaataaaattttcatcgtacaatatcctctgttacaacgctaccttttttgatgataactgggttgttttctgtaccgcgaaccgtaacaccttcagcgatttcaacacctttatccacaatagcatattcaactgttgcgcctttagcaactttaacacgtgggaagataattgaatggctaacactagaaccttcagaaaagtcaacattacgtgaaatcattgagttctcaactttacctcgaacaatcgaaccagatgcaaattgtgaaagcttaacttcagaagagtctgcatagtatgttggctcttcatttttaacttttgtataaactttttggtttggtgcaaaaagtttatagaatttttgtgattccagcatatccaagttagcatcaaagtacgcttttactgagtggatatttgaaaggtaaccagtgtactcgtaagcaaaagcattttcagcaactgccaaatcacgaagtacataacgaagcttacgaggttcttctttagctgcttcttcttccaatttttcaatcaagaatggtgtatccacaacaaagatgtctgtagacatattgtaaacttctttatcgccaccctggaagagctcatggccaagcactttgtcagagtcatcaatttctaaaacgctgtttacatctgaaatgagttctttaggaagttttttgtagaccacagtaacttttggttttgttgtattgtgaaggtggaaaacttggttaagatcaatgttgaccaaaacatcactgttaagagctacagtctgatctgagcctgaacgtttaaggtaagtcaaaatttgacgatagtattcctcatcaacagttgagctttcaacaggagtattgtaaataccaaggtagtagtgactgagaagagtagacaagccccactcacgacctgaacgaatatggtcgaagacagaactgatgttttcgttttggaagattccgaagacgctacggataccagcattagccaagttagacaacgggaagtcgatgaggcgatattttccgccaaatggtaggctggcaataggacggtgctcagtcaaaccacccatgtcatggaatcctacggtatttcctagaattgcagaatatttatcaatcttcatcttttggtacccccactacttcattgtatcctacgacttgcacttcttctgtaccgtcaatttccacaccatcggaaatgtgtgcaccttcaccgataatagctcgtttaatttttgcacctttaccaataattgcaccactcataatcactgaatcttcaacgactgccccttcacgaatttgtgcacttgttgaaagcacagaatgtttaacagttccatcaaccaaacatccatcaacaacgagtgaatcttcaacatgagcattctcaccaaagaagtttggtggagcaatcacgttacgtgagtaaattttccattgacggttacgactatccaaggcattttcaggagaaatgtactccatatttgcttcccaaagggattcgatagtacctacgtctttccaatagccttcaaattcataagcaaagacgctttcacctgtttcaagataagctgggataacgttcttaccaaagtcagacatatcaaccgcactcttttcagctgaaaccaacatattgcgaagacgtttccagtcaaagatgtaaatacccattgatgccttagtagatttaggattttcaggtttttcttcgaactcgacaatacggttattagcgtctgtgttcatgataccgaaacggctagcttccttaagtggcacatcaagaactgctacagtaagactcgcgttgttgtctttgtgtgcttggagcatgtcatcatagtccatcttataaatatggtcaccagacaagattaaaacgtattcaggattgatgctgtcgatatagtcaatgttttggtaaatagcgtggctggtaccttcaaaccaacgattaccttcactagctgagtaaggttgaagaattgatacaccagagttaacaccatccaagccccaacttgaaccatttccgatatggttgttcaaagcaagtggttgatactgtgtaatgacaccaacattgttaatccctgaattggcacagtttgacaaaccaaagtcaatgatacggtagcgtccaccaaactgaacagctggtttggcaatactttgggtcaattttccaagacgagttccttgcccaccagcaaggatcaaagccaacatttcatttttcatgaatagtccccctcatgatttttagtttcatcccaaaaaggatgacgagataatcagtcgaaactggttatgacaattaaagtaagtttttcactaatggtaacagttcgaaaatcaaaagcatcttagaattgagattttctatctatcaccccgaaaaacaaatcgtgtacacgtttaagtctaccctttatttcaagcgacgttttacacgccagatacttgctcctagagcaggtagggtgaagctaagggtattttcatagtccttccacttcgccttttgggtacgggtttcaggatttccttctttccagacaccaccgaactcttccatctcagtgttaagcacttcttggtagataccagctactggcaatcctatagtgaagttttgtcgttccactggagctaggttgaagacacagacgaggaagtcacccttatcgcctttgtcatccttacgaatgaaggaaagaacactttcagctcggttatccgcatcgataatttcaataccatcgtaagaatcatcaatctgccagagagatttatggtccttgtagaaagcattcatatggctagtaaaggcctgcatcttctggttcatctcatcttcaagattaccccattcgagttgataatcaaacttccactccaagaattgaccaaactcagaacccataaagagcaatttcttacctgggtgacagagttggtaagcatagaggttacgaagaccagcaaattgattatagcggtcaccccacatcttatgcatcatgctcttcttaccatgaactacttcatcatgtgagaaaggtagaacatagttttcattgaagcaatacatgaaactgaaggtcatcagattgaagtcatactgacggtaaactggatcttctgcgtagaatttgaggatatcgttcatccaacccatattccatttgaagtcgaaacctagaccaccttcttcaatcggttgggtgattggcgttgctgcagttgattcttccgcaaccatcataacatctggatagcgttttttaatttcacgattgagtttttgaaggaagccgtagccttccaagttacgatttccaccgtccttgttaggcatccatggaccttcatcatagtccaaatagagcatgttagatactgcatccactcggataccatcgatatgataattttcaatccagtaaagagcacttgaaataaggaaagactgaacttgattttttcctaagtcaaagttaagtgcgccccaacgatagttatgagctcgatcatgatcctgatattcgaaagttggtgtaccatcgaagtaggccaaagcatcgtcattctgtgtatagtgacctgggacccagtctaccaagacaccgatattattctggtgacatgcttctacgaaatcttgaaattcttctggtgtgccataggtatgctcaaaagcaaagtaacccataagctggtaaccccaactcatcccaagaggatgagccatgagtggcatgaattccacgtgagtatagttcatctcaaccaaatatggaatcaactcttctttcaattctttgaaagtataaggttgaccatcctcttttagtttccaagatgatgcatgagcttcatagatattaaccggacgtttttggaaaccaaagcgtttacgacgacccatccaaaggccatccttccacttcttagttttcttcttacgaatcacagctcctgttccaggacgaggctctaagtaagtcgcaaaaggatccatcttttcgacgacttgacctcccttacgtttcaccaagaacttatagagttgtccttcctctgggagagctgaagtcgcctcccaaacaccgatatggtttttggtcatatccagaggttcatcaaaccaacctgtgaaatctccaattacctgaatctgctcagcatgaggggcccacacacggaagataaaaccttcttctccctctaattcatgcacacccagataattctgaaggtggaagttctcacctgttccaaacgtgtacatggcttcatcgagattcataccatcactccttccttaaattagccttgatagatctaactatcaagaaattaaaacattgaaatatatgtaaatacactagaaaacccttcagaccgatagggcttacaagtaaacaaaaccacttatgtaagcgtttactgtattataacattttttgatattcttgtcagtaaatctccaaatcttttttcatattgttgaataccaaagtttcacgtaattttcctgagatgtgcaattcaacaatacctgaatcgtactccgcttttgcgacatagaggttatcgtaaatatctgcataagaacgataagagaactctggaacggtttgtttacgctcaattaatttggcaactttagcaaccaagtctttcttaagagtcacttgattccaatccactctattaacctcatcaggggcattgtagctattcatggcacgcttgacgtctgcttccgtgtaattgccatcttcgcctgtggcaaccatcttagtgcgctggaattcttgtcccaattgcatgaaacacatcccctgcatagtcagattgagggcattagccaagtagatacgtttctcaatgtcctctggcgaatcatgtggatgcaaatggtgcatcaaatcattcaaattgtagttgtcatgcgcttcgatatagttgaggacctgacctggcatgaggtagtttacaaaaccacggctaccaagcagactcttggcaatctggtcttccaatggagctccagacacatagccattactgatgtgtccataaacctctgctcccttgaccgcatcacgcgcattgtcattgaaaaatccgattctaggcatcaaggctgcattatccttcttgcccttttgatccacaggaagaccaattcccatatcccatccttcaccataaagaagaatcctagaatcaatatcatccatggctgaacgaatagcattcatcgtagcaacatcatgtaagcccataaggtcaaaacggaaaccatccactccaaattcttctgcccaataagtcaaggaatcaatcatatacttacggtacatttccttttcactggctgtttcatttccacagcctgatccatcttggaaagacccattgtcatgcatacgatagtaataagctggcacagatagttggaatggagagctatatgaagagtaagtatggttataaaccacatccatgataacccctatccctgcctcatggtaggcctgaatcattttcttaagctctaaaattggtgccacgggattcttttgatcagcagcaaactgacggtctggaacattgtaattctcaggatcatagccccagttgtagagcaacttaccatctttatcataggttttatggtgatcaaagaccggttgcagttggacatagttgtagcccatacgtttgaggtaatcaaagccagtcacatctccatgggcgtttttagtccctttctgacaggcacctagataggttcctctataggactgcttaataccagatgtctctgaaatcgagaagtcacggaggtgcatttcacagattacggatgagcaagcatttgccttacgccagctcgctttttgcttagtaaccttttcataccctcttgggacaagtctcttaggattgaccaccaaactttttttattatctaagctaagggcgatactgtaggggtctcttgtatcctgatagaagctttcctcatgatacacacgaaattggtaggctaccccatccaaatcctttttgacagtggcactccaaacaccgtgagtattcatctcatgacggtccttattgatactggttcctcggctcatcttaatgattttagggtttttactgccctttttaaaaagcaagagctgcacacgacgagctagaggtgaccaaaggcgaaactctgtagcccctttttcatacttatgacctaaccaaccttgaaagccccacttctggtcaaattcctgccttcggagagccatatcaaaggcatgctggtcgcgaccttcaaaactatggctagtcaaggctgcctgtttagaataataaaccgttggatcaccttcaactatccaaatagcattgggagcatcccctaggaagcgtcggacacgataatcatgtgtttgcctcgaccagtcttccgttttgaccaaaagattgacagaatcaataaaacgattagagggagaagtgacctgaccaacaaggccaaaatcatcttcacgtgaaaaatgggcttcttcgccccaataaccatctagccacttccacatactgtatcgggaatagtcgccatgcatactatgaaaatgaacggttaataaattgtccattttttactccttagtttttattactcactttttctcctattatagcagaaaatgttcgttttgtaagcgttcttatggaatattttgcaattttttggtctattttgaacataaaaaaagaatgagaaaataaatggcaaaacactcatttttctcatttcttttgtctatcttaattcttttaaaaaccaggcttgagactctttccagttcattattcttgagtcatcaaaaccttacgtggtttggtaccttcagctggtccgataacgcctgcttcttccaactcttccatcaaacgagtggcacggttgaaaccaactgacagacgacgttgaatcatggaagcacttgctttttgtgtttcaaggaccaaagccttggcctcttcaaagagtgggtcaccttctgagctaccaccattggcagacgaacctccaccaaaatcattctcagaaacttcaccagggtcaaagctctcatcgtagtcagcagaagcctgatcctttataaaggtcacaatacgttccacgtcatcatcagaaatgaaggaaccttgtagacgaacagggtggttctcatcaatcggtttgaaaagcatatccccacgtccgagtagcttttctgccccattttcatctaaaatggtacgactatctgttcccgaagacaccgcaaaggccacacgagaaggcacattggccttaattaaaccagagataacatcaaccgacggacgttgagtggcgagaatcatgtgaattcccgcagcacgcgctttttgtcccagacgaatgatggcatcttccacttccttactggctaccatcatcaagtcagccagctcatcaacgataaccacaattaaaggtaggggaatctgtttttcttgggattgggcattccaatcttcaaccttagcattgtagccagcaatgttacgtacgccaaacttactaaagagttcgtaacggttttccatctcatctaccactttttgaagagccttggcggccttacgtgggttggtcaccacagggataaggagatgaggaatatcattgtaaacagagagctcaaccatcttaggatcgaccatgaggaacttaacctggtcaggacgagccttcataagaatactagagatgattccgttaaccgcaaccgatttaccagaacctgttgatcccgcgaccagcaagtggggcatccgtcccaaatcaaagctacgagccgagccatcaactgccttaccgagaggaacttccaagagcttattaggatccgtcttggactgttcccaaagttcacggaaagaaaccgtcgcaatctcagagttaggcacttcgatcccaaccaaagattttccaggaataggggcctcaatacggacatctttcgcagctagagccagagccaagtcatcagctagatttgaaatgcggttaacacgaaccccaacagcaggcttgacctcgtacttggtcactgacggtccaatttcggctcgctcaaccttgacgtcaatattgaaactcttgaaggtatcttctaagattcgaatattcttacgaacgatgttcttctctttagattgactcttaggcttatcaggtgcaaagaggtctatctgaggtaatttatactgtaagagctccttcggtgtgaaatcaacctcgacaggtgcatcatctccctcaacaaccatagatggcggaaactcctcggttggcacatcctctggataaggtgcataatcttcttggaaatcctcataatcctctggagggagattatcatagtagtcctcagaggcataatcactgatttcaggttcaggtgcaaaaatctcagtttcttgtggtaactcctctgcggcatcatctaagatttctcccgtctcctcgtcaacagttaaatcagccagacgctcggcttcggcacgttcttccgcctcacgttctttctgagcctgacgttctgccttcttttcctgacgttgtgctatccgttccaaacgcttctcagcccctttttgccaagcttccttagcatactccatgatatccaagacatcccaagggctaagaatgaaagcccctaagagaataatcaataccccaatcatgaagctaccgatatttgaaaagaggaaggaaatcggttgatacagaagagcccccaacataccaccacccgcaaaacgagctacttgcacactcacaagttccccaaaaagcaagtccttggtaccagggaaaatatccagaccgttcatacgatctagactaaagagataggcatgaaactccaacaagagccccgcgaagaccatccaaaatcctgtgacatagttactgtgtttacgtaaccatttaaagccaaagagataaacatagatagcaaaaattaaagggtaagccatactccccacaaatacgcgaaagatattatagagggtaaccccaaagaaacccaatcgaaagactgggaaaattaagacaaaggcaaaaaagaaggtccatagcattcgcttaatcgccttctgtctgtctaattctgcttttgtaagacgcttcttaccgttcttagaagccgccccttttttcgtttttttcgttgtagccataggtgtattataccacgtttttagacatgaaaaaagagagacaagtctctccttagattaaagacaaagtcttcttttgacattattcttcaattaacgatgttgagtgaaccggacgattcttaccatctggatcaatatattgaatagcttggttgatagcgataggagcttcacccattcccacagcaatcaagtcaatcttaccttcatattctgctgcatcaccaatagcataaacaccctcttgtgaggtttcaaattgagcattaacagtaacgctagaacgtttatagtcaacgttccagttacgaaggttcttgttgttagttgaaaaaccaaagctaacgatgagggcatcaagtggcaattccacaacctcgtgtgacttcactttttgaacggtcaaactttgggcaagaccattttcacccttgatttcaaggggtacataaggcgtcatcacattaactgatgattgatgaagaagctctacactatgctcatgggcacgaaaggcatcacgacggtgaatcaaggtcacgctctcagcaataccatccaagtgattggcccagtcaacagctgaatccccaccaccagcaatcacaaccttcttgccagcaaactggtctagactatgcacattgtagaacaagttattatccgcataatcttcttcattgtccacacctaaaggacgtggagcgaaagcaccatttccacaagcaatgacgatagccttagacaagtgttgacccttgctagtagcaattgtgaagatgccatctgtcttttcaaaggtttgaacttcctctttcaaatgaatgctgacacgatcttcaaaacgcttaagctgagtcaagaggttttctgtcaattccgcacctgttgtttgaggaaaggcagggatatcatagattttcttctcagggtagagaatggcaggctgtccaccaagctctgacagactctcaataatattaacagtcatgccacgtagaccggcataaaaggcagcccaaagtcctactggtccaccaccaataatggtaatatcataaatcttttcttctgacattttatttcccttctgcttttatctcttctaaaatctgacgttcttcatccgtaaagtcatagttttccaagaggtctggtcgacgctcccaggtcttacgcaaactctgttccatacgccaacgtcgaatattgacgtggtgccctgacaagagaacatctggcaccttcatgccacgaaactcagctgggcgcgtgtactgtggaaattccaaaagccctgatgagaaactatcatccttatgactagcttccttacctaaaacttcaggaatcaagcggacagtcgcatctacaatagtcattgcagccaactctcccccagttaagacaaaatctcccaaggaaatctcatctgtcactaaggttttgatgcgctcatcatagccctcatagtgaccacagataaagaccaattcctcttcttgcgccaattcttctgcataggcctgatcaaaggtacgacccgcaggatctaagagaataacgcgaggttttgtgacgtctaacttgtcaaaggtatcaaaaattggctgggcacgtagcaacataccttgaccgccaccgtaaggttcatcatctacgtgacgagccttctccgcattttcacgaaaattgtgatagttgatttctaaaaggcccttatcctttgccttaccaacaatggaatgctctaagggagcaaacatatctggaaatagggtcaagatatcaatcttcatcgtctaatccttccatgagctcaacctcaacacgtccagctacaacatcaacatcgagaactacaggtgggatatatggcaagagcaaatcttttttgcctttacgttttactacccaaacatcattagcgcccggctggagaatctctttgacctgaccaatcaaagtatcaccttcgtaaacatcaaggccaatgatttcatggtagtaaaattccccatcatcaaggtctgttaggttttcctcagcaatcttgaggctgcagcccttatacttctccacatcattgatatggtaaagccccttaaacttaacgatatcaaagtttttatgtttacggtgactcgcaatctcaacatccatgatgtaattgtctttgtcatcaaaaagggctaggacactcttcttcttaaaacgctcatccgcaaaatctgttacagacaaaacacgaagttccccctgcaagccctgtgtattcacaatctttccaacgttatagtatgtcattgaatttccttattatatgttttcttattcaaatgaaaccacgactcgacgaattatttgttatcatctgacagccatcacaaaacaaaggtttttcttcgggtcgaggtctcgttatttatgattttaaagtggtataaaatgtctgacctaggccagtcaacccctctattttatcaaaaaggacacaaaaaaaccagctttctctagctggtacttatagtccgtacgggattcgaacccgtgttaccgccgtgaaaaggcggtgtcttaaccccttgaccaacggaccataatctgtgtctctaccctcaggtagaactggggtagctggattcgaaccaacgcatgagggagtcaaagtcccttgccttaccgcttggctataccccaaaagactcttatcattctacagaaaaactagtaggctgtcaacacttttttaaactttttttcaaaaaaagcaaccggaaataccgattgctaggagttaggagatttcatcatctaagcgaacttagatagatgatatgaggtcgcttcaaccccatatgaaaaaagaaaagttttaggatggtttaattatatgttttgctagaaataaagtcaaagaatttgactcacaaaatccgagttagggttaagagttatgataaccctctctagcccctagataacaaacttagttgatagttttattcatcatcctgcgaaaccaaatgatgtctaaaggcataaacgacagcctgagtacggtcatcaacattgagttttccaaggatattagacacgtgagttttaacggtcttcaatgaaataaatagctcgttagcaatggtttgattgtcataacccttagccaaaagggccaagatatcacgttcacgtgccgtcaaatcgtcgtgtaggtccggatggctatcatggtatttaatcttattgtccacctcagtttcgatagcttcttcaccacggtaaaccttacggatactattgagaatctctgccgcactactagttttaagcatatagcctttagcaccagcttcaatgacaggataaattttttcattgtctaaatagctagtcaaaaccaaaatcttggcttcaggccattctttgagcaattccaaagtcgcttgaaccccatctaattcaggcatgacaaggtccataacgacgacatctggacgcagttccaaggcaagatcaacaccctctcgaccatttcctgcctccccaactacttctacatctccttggagattcaagaaacttttaaggcccaaacggaccatctcatggtcatcgaccaaaatcacattaatcttattcgacattgtcttctcctcttaatatcggcacacgaacatcgatagatgtccccttacctttagcagataggaactgcacagttcccgccatttcatcgacacgctcttgaatatttttcaagccataactcatctcgtcagtcgaagcatttaagtcataaccaacaccattatccaacattttcaattgaatttcctgactattttgatagagataaacctctatctggctagccttggcgtgtttaagggtattagagataaactcttgggcaatcctaaagagattattttcaatacgcttgggcactttcttaaccatatccttgtagacgacatggatattggatttatcggttaattccttaaggatcatctgcaagccttcttgcaaggtcttgttctcaagctctgttgggcgaagatgcaaaagcaagacacgcatatcattctgagcgtccgtcagcatagcctcaaccgcctggatttgattatgcaaatcttccttacttagctggtccgccatctgagagacaccagataggatcatactagccgcaaaaagttcctgactaacggtatcgtgaaggtcacgagcaatacgtccgcgctccttcttgataatatcacggctttgtagagcttgggcattctcagttttctgcaagtccttagtcaatttacgcatcttatgagacaagcgcatcatattcttgtctaactcaatatctccctgacgtttgacaggttgattattgataatgcggcgcaaatcctgattgactgaacgcatactgttatcattggcaatggcccaaagaatataaagcaaaatgagcaaactcagaaccacaaaaaccatgttaaaaaggaagtggaaggcctgagacagattgccgaaaactagtgaaaagttgaggttaaagctatccatcactacaagggtaacgccaaccaaaactacaaccgagtaaatcaggattaaaaataggtactgtttcttcatttacgacgtacctccactgggccagctcccacattgagaatcaatttaactgtccgatgggcatgctcatactctgcaccttgcaaggtcaagctttcataacggaggtcgtattcatcttcattaaagaaggtgacagagctataaattgccgatatgttgagtttgacggaaacatcaattggtaccaagatagtcgtcggtccatagagtttctgcaaaatcacgacattatctcgccccgaaacaataacctgagtcaaatcaatcacatctgtcccaaagaaacggatgatattgatatcatcaaagtcataacgatcactgacaggttccatacgggtcccaatccactgatttcggacagcccgaggatctaagtcatcttccttaaattggatgagggcgtagcgattctttttcttaacctgtgaaaaatggtttatcatgacataggccacacccactaggatagcaagcaccacatagatattccacatggaaaccagaaaaagtgagatcaaacagatggtcaagacaaagtcactcttggactccttgttaaaaaagcgaacggccaacaaggtcaaaaccagaataaaaataaaactggtaatatcattattaaagatggtgatcaggcccagagtcaaaagcagggcttccaccactatgaaaaaattaaatttggtcataaggacctctcaaataaaagtatacagggttcattctatcaaattttaaggcaattgacaaaaagacccagtttgagcaccgactagtcaagatagaaaaggagcagcagaaagcaaaaaagtgtctccattacaggaaacactgtctttcattcaaaaatcctaatcgtcagtttcgtccattttactatttatgagttgcaccgtacttctgatttcctccagtatgacacgttgttccgccaactccttctcaatctcagccaattttctttcagtctgacgacctgaccgcacaaaaatattattgagagagcttgttaacaaccccagagtggcaatcccactaaacatgagaacgaccgcaacggccttacctaccaatgtttgagggacgatatctccataacctactgtggtaaccgttgctacagaccaccaaatagcatcaataaaattatggtgctctactcgggcaatgacagcactactgataaggatgataatactattaaccgaaagcagaaaataaaagccatttctgcgattaatgcgattggaaatgtgcttgagcttgctactcaaaccaattaagcgggagagtttggccaaacgagcaaagcgtcccacccttgaaaaacgaaggaaggtaaagacttcattatagggaatgatagctaacaagtccaagatatgcgttttaacaaaaattcgcttacgaggtgccaaggagaaacgaatcgcataatcaatggcaaagatgagcgttatagactgatctatcactctgaaaggtcgccttccaattgaaattaatccaaccaaatcaaagataaccaagccaatggaaatcagggccaggaccgtcatgacgatatcgtaggtaatgatataccttctcagttttctacggtttctcatagcgtctctcctatatgtgatgtcttcattataaaagaatctctgacccctggcaagcaggctttttaagctatcgacaagaagtctagataacaaaaaagagagatgaaataacctctctttttttgttaccttagttatttaaaactactgtagctctgtgtgagtagcctctgtcgaggtttcagtgctagaacttgtactgtcagtacttgagctcgttgatgacgaatgtgtcgtactgcttgagcttgactgtagacttgaacttgctgttgcaaccgaaacatagagaatcactgtaccatcaacacttgtaccagcttgtggatcttgataaaggacctctgtactgctaggaaccttatccttgtctaacttggcaccagtattatagtcatggtactcgatactactacttgagatactcttacgattcaaggtttgaaccgctgttgaaaccgtcaaaccagtcacatcaggcatggtaactgtcttaggagttgccacacggaacttaatcttggccttactatccttaggattgaaagacttgtttttccctggactttgagataggatttctccctcttcagcactgtcgtcttcgacatgctgaatatcaatttggtcctcagaaacgccataattcgaagttaagtcctcaatggcatccttatagtttttacctttgtagtctttcaaagcgaaacctttactaccagaagaaacatagacatcaatgcttgatccttcttttcgtgtagttccagctgtaggatcagtcttgatgaccttgcccgtatcgacagaatcatcttccacttctttgacttctcctaccttaaatccagcaccctcaattttagtctgagctgtggacaactcttgaccgaccacattaggcacctggacattatcaggattggtaaataccaaataggcaaagatgatgataccaataaagacaagtcctaggaaaaccttgagcaaggttgagaagaaattcttcttctttttcttcttagctggtgtcgtttttttccttggttgtttacttggagcaggtgtaggctctgatggctcagcagcaacagcctttttctcaaggcttgctgatggaactggatcaacctttggcaaggtcttagtatccgtcatatcatcaaagactaccttggcatcgcgtcgatgactaggatgcaaactcgttaccaagtcacggctcatttccaaagtactattataacgattttctagttttttggctgttgctcgaattaccacgttttccaaggcttgaggaacgttacggttctctgccaaaatcgatgggagtggcttttggaaatgttggagtgcaatggttactgcactatcaccatcataaggaatatgacctgtcaacatttcaaaaagcataatacccatagcatagatgtcgctctggatagtcgctttagatccacgagcctgctctggtgagaggtagtggacagaacccaacatagagttggtttgagttaggctagtctctgcaaaggcaaccgcaattccgaagtctgtaaccttggccgtaccgtccttagttaaaagaacgttttgtggcttaaggtcacggtggataatgcccttttgatgggcaagtgtcatggcggaaagtacctcccccatgatacgcacaacatcttggttagaaagtggcgcatggtcttgaatgtatttcttcaagtccgaaccgtccacatactccatcaccaagaactgctggccgtcttcttcgccaatatctcggatagcaacgatattaggatgactgagttctgccatggcacgcgcttcacgctggaaacgcgccacagccacctgatccgtttggtaattggtacgaagcaccttaatggccacttcttcattatccagaatcaggtcattagccagataaacatccgccataccaccacgtccgatagatttaaggattcgataacgtccagcaaacaatttgccaacttggatcattatccttcctcactttctatcttaatgagagcaacggtaatattatcaagaccacctgcctcattggctgcagctaccaaacgactcgttttttcttcgacgaaaccagggctattgacaatatgtacaatctgttcaactgaaatcatattggtcaaaccatctgaattggccaaaatatagtcccctggttccaattgttgaacaccaaggtcagcctcaatcggagcagcttgcccaatagattgcgtaatgatattacgttgtgggtgaactgctgcttcttcttcggtcaactgaccagccttgataagagcattgaccaaagaatggtcattcgtcaattgcttatactcaccattacggataagggcaatacgtgaatccccaacatgggcgaaaatcacagcattatcaacaaaggcaagaacctcgatagttgttcccattcccttatattcttcgttttggccaagttcataaattttacgattttctgcatcaatggcagcaatcatccaatcacgaatctgactcaactcactaaaatcagtgttaatccagtcgcgaccaagatcagtcactgacatctcactggcaatatttccagcacggtgtccacccatcccgtctgcaacaacgacaagggtaacaccagcttggttgacaaatttattaacaaaatcttggttatttgaccgtttttggccaatgtccgttaataatgatatttccatagttttctttctgacttgcgtcagcatttcctcctctgtaaccctaagcttttttacgcaactgtgcgatgaaaaaaccatcagttagatactgttcgggggtaattgccaaacagccattgaccacgatgtctttacatggatggtctaaggcaacttgctcaaaatcaggatggctctcaagaaaggcttgaatcacctcttgattttcttctgctatgatggtgcaagtactatatgttattataccaccttttcgtagggtttgacaaacgctggataggatatccaactgcacagccttgagggactcaaagtcttggagatccttgttatatttgatgtcaggtttccgacgaatgagcccaattcctgaacaaggtgcatccactaaaatcttgtcaaaactatcagctggaaagacttgatgtacctgactagcatccagtttctgagtcttaaccttatcagctaaaccaagacgttgtgcattttcttcgataagagcaagcttatgatcatagaggtcaagcgccgtcacatgtccactcgtcaaatatgaggccatatgtaccgtcttacctccaggtgccgcacaggcatccagaatttcttcctcaccttgaatccctaaagttggcgcaaccagttgactggtctcatcctgaatggtcaacaagccctctttaaaataatctgtcccagcaaagtaacctgaagacttaacaagcccgactggggataatactgaacactcagccccagtggcctccgcaatctcttccaaacgtgacgcatccgttacacgcacactagccttgtttctcacaaaaaggctttggaaaatagcaagggcacgattctctccatactggtcgataagttttttaaccaaccatacaggtagagaatactgaacagaatagcgtttattgacacgtttgattgtgcttggatctggcaaaggctggctagatagtttacgaagaaccgcattgaccagcttctcagccccctttttattgccacgatttttagcaatagaaacggcatcattaaccaccgcatgggctggaatcttatctaaataggccaactgatagaggctcaaaagcaataagtcatagacccaaggttcaagcttgtcacggtcctcgatgacatgggctaggacccactccaacgtaatcttacgagctacggtcccatagacaatttccgtcaccaaggccttgtccttatctgtcagatgcgacttgctcagatgggcattgagagcaatatttgagtaagctccttcctggaagacttcttctaagacttcaagtgcctgtccacgggatgtttttttccaatcattggccaaatgcatcacctacttcaagattgcgtccgaccccattaaggaaatcagcaatagccatacggggttttcctgcaggctgaactgtcttaagtgaaatggctccttgaccagtcgcaactaccaaactcttcttggtcttttcaatgatatgaccagcctgtccttgaccttctaccaagtccgcttcataaattttgaaacgtttgctgtcaagcaaggtatgtgccacaggccatgggtacataccacggatttgattgaagatgtcacgagacgatttattccaatcaagacgctcctcttctggactaatatttggcgaaaacgttacctgactggcatcttgaggaacaggtttgatttcgccagcaatataggcaggcaaggtctcaagcaaaaggtcacgacccaagacggccaatttttcaaacatggtaccaacattatcctcgtcaagaattggcaaggccttttggctaaccatgtcaccagcgtccatctccttgaccatttccataattgtcacacctgcttctgcatccccattgataatggcataatgaataggtgccccaccacggtattttggcaagagagaagcgtggacattcaccgcaaaatccatgctattaagcaacttgcttggtaaaaattgtccataagctgcagtaacaatcccatcagcaccaagtgccatcaattgcgccatttcttctgaccctgacaatttttccggttgataaattggcaagtcatgcgccaaggctacttccttgaccggtgtcatgcgaatttcttttttacggccgacagcacggtctggttgcgtcaccacagcgacaatatcataacgctcatcggtcaaaagtccttccagcactgtcgctgaaaaggcaggcgttcccataaatactaattttgtcatattcttccttttctagattaggtaaaattctgaggttcgtgatcaataatcaaacgcaggtccttgttttcaggttcctgagtcatgtcaaggaccctattaagtgtttcttccaagttatcctcaaaacggtatttgataataatctgatagtgataaaggttatgtgttcgggcaattggcttaggcgtaggccctaggaaggtcaccttgtctgacaggtgctctcttaaataagccataacctcatagctcttgcgaaccacaaactcttcatccttgtgagaaagcgtaattcctaccgtatagaaataaggcggataggccaactgacgtcgaatccccatttcataggcgtagaaaccttcataatcctgttgctgtgcaaaacgaatggcataatgactaggattataggtttgaataataacttccccttccttatccgcacgaccagcacgaccagccacctgagttaagagttggaaggtacgctcagccgaacgaaaatctggtaaatttagcgacgtatctgcattcaagacccctaccaaggtaacatttggaaaatccaagcccttggcaatcatctgggttccgagcaaaatatcggccttgccacttccaaaggcctccaagagtttctcgtgagcccctttcttacgtgtcgtatcaacatccatacgaatcactttggcttctggcaaaagttccgtcaattgatcataggccttttgtgtcccagtcccataataacgaatctgacgactctgacagttagggcagacatgtggtattgctttttgaaaatcacaatagtgacaattcatggtcttggtatccatgtgcaaggtaagtgaaatatcacaattcggacaatcatccacatagccacagtcacgacacatgacaaaagaggaatacccacgacgatttaacatcaatacgacttgttccttacgtgccaaacgttccctgattttttccaaaagaggtggtgtaaaatcactcgcctcttgacggcccacaaaatccttgaagtccaccacttccacctgcggaattttagcattaggattagccctttgtgtcaactcaagaaaatggtaaacccctttctgagctctcgcccgtgtctcaatagagggtgttgctgacccaaggacaagcacagatccatgactcttagccctaagcaaggcaacatctctagcatgatagcgaggattggactcttgtttataagtagcctcatgttcctcatcgataatgattgccccgatattgtccaaaggagcaaagatagccgaacgcgctcctaccacaaccttggcctgaccagatttaaccttacgccactcgtcaaatttctcaccgtctgacaagcctgaatgcataatcgccaccaagtcaccaaaacgtgaaatgaagcgattggtcatttggggtgttagggaaatctctggcaccaagacaatggcggtttttctcatagccagggtcctctcgataagatgcaggtaaacctcggtcttacctgatcccgtcactccttccaataagaaaggtttgccaccttgtccaatttggcacgtcatttcttcaaccgcatgcgcctgttgggcattaagctcaagaaaatctgtcttttctaccttttcaaagtagctatcggcacgattgacctcaacttcggtgatgaccaaggcaccagcttcaatgaaaaacttaaccacatctcgtgaaaaaagcttgtggagatccgtcaacttgccagactcactcttttctagcaagaagtctcgcaactccaatcgtttcttagccctttgcgaaatagccaaagtctcgagaatacccttttgaacactatagtgcttctcagtcttgatattctgcttatctttagcaaggtaatcaaccgttacacgcccagactggaccagacgaggaatggcttgacgttgtacctctgacaactgcgagaaaagaatatgattctgcccttgaaggagagtctctttttcctcttcacccagtttatcagttgccatgataaccttatcgtactgcgaattaaggagaccaggtagcattgacttcaagatggaaatcttataagaaaagaccgtatgtcgcatctgatcagccaaatccagctgttcctgattaagcactggctcataatctaaaagctcagcgatgggttttagttcaggaaaatctcttaaattttcctgctcttccaagccaataataaaaccttgaagtaaacgatttcctttaccaaaaggcacatgaacccgcataccgatggcgatttgttcttgcatggcttccggtaccaggtaactataaggtctgtccgtctgcatcagaggaacgtcgacaataatatgtgctactaaaaccataaatttcctcctgtcacttccttaagaccagtatcttccaagctcaagaaaatatgagcttcctattatcgtcataaagaaggaagctgagacactatgcctcagctcccctctcctcataaaccaaagcaagactttgattttagattttatcgccttcttctttttctttagcgatttgttctttgattttacgttcttcttcctcagcagcaagacgtgcttgaatcactttcaaacgtgccaattcacgtttagattctggatctgggtggatagtcacattaccagattcaatctcttcaagggcttgaagggttggttttactgacgtaaactcttgagttggttcagcaccagcggctaattcatgggcacgtttggcttgcaaaataaccaatgaatattttgaaggcactttatccaaaagtttgtcaatagagggtttcaacatcataattctatacctatttctaatttatttatctgataatttcttttctgaaatcatattacgatagcgaccaatcacacggtcaactcggaagtgttctgcttcaataacacgtttgacacgctcagcagccaaaggcacttcgtcattaacaatggcataatcgtattcgctcatgagagcaatttcttcacgcgcacgctcaatacgttgagcaataacttcctcagagtctgttccacgaccaaccaaacgttcttgaagctcgttcaaatccggtggtgtcaaaaagatgaagacagcatctgggacctttttcttaacctgaagggcaccttgaacctcgatttcaaggaaaacatcaatacctttatccaaggtttcattaacataagtcaaaggtgttccgtagtagttacccacatactcagcatattccaacatttgaccattacgaataagctcttcaaattcctcacgcgaacggaagaaataatcctttccatcaacttcaccaggacgttgagcacgtgtggtcattgatactgagtattcaaatttgtggtcaggtgttgaaaaaatctcctgacgaacagttccttttccgacaccagaaggccctgaaaaaacaatcaaaagtccacgttcagacatgtcttctccttaaactaagattaaaaatcttcttatgactcaccttaaaaaagagaaaacaatcatctctttttttggcttaggggttgttcagtgattaagttacagctcacttttcagagcatgcgtttttccttactattttaccaataaaagcgacttttttcaaggtgaggacaccattaaaaagagtgaattccttttctcagtactcactcttttttaaatactcttttaaaccaaaccagtcaagagaccttgcatgaattcttctgaatggaactcaccaatatcatcaattttctcaccaaaaccaattaacttaactggaatatccaactcttggcgaatggctaaaaccaccccacccttggcactaccatccaacttagtcaagacaagacctgtaagaggtgtaatttttgaaaattccttagcctgactaagggcattttgacctgttgaggcatccaaggccaagagggtttcatgaggtgcttctggaaccacacgtttgataatacgaccaatcttttcaagctctgccataagattatctttattttgcaaacgacccgcagtatcaatcataaggacgtcaactccctcagcaagggccttttccataccgtcaaagaccactgaagctgggtcagccttctcagcaccagtcactactggcacatcaacacgacgtccccactcaaccaactgagcaacagctcccgcacggaaggtatcagcagctaccaacataacttttttgccttcttgtttgtatttatgcgccaacttaccgatagacgttgtcttaccaaccccgttgacaccaacgaaaagcatgactgtcaaaccatcttggaaattaatctgctccttgtagacatcatccttctcgtagatatccacaagtttttcaataatcaagcgttgcaaatcctcagtctttttgacattttcaaggcgggcttcatagcgcaaatcttccgttaattgcgttgcaacattaactccaacatcagaaagaattagcatttcttccaattcttcgaagaactcctcatcaacacgacggaaattcgcaaagaattcattcaagcgggcagcaaaaccagtacgcgtcttcttgagggtacggttatatttctcttgttctgtttcagtttttgaatcctgaacttcttcaggtttttcctcaactttacgggtttgaacggcttcaaaagtgacagtttcacctttttctgcagcagcagctacttgagccttcttagcatagtaatcagccatgacatccgcaaagtggttatccacagcaacttgactttcttctgactcggaaacgccttctgcttcgcttgaagcctgattatcaacagaaaggtcttcgtcagacactgcttcactttcttctgtcacagtagaatcactagattcaacagattctgtggatgaaatctcttctacttgagtctccgactcactgagctgttctgtttgactctcgcttatcccttcacttgttgataagtcttgattatcaagagcctcagtttctgaaatttcatgatttgctacagtttcctgtgactggttttcctcttgtccaaataatcgatcaaatagacccatttggttctccttatttctctagaatatatttgtggatggcctcagccactccagattcctcattagtttttgtcgttactgccttggcaacagccttgaccttgggaacagcattcgccatagccacaccaagactagcccactccagcattgtcaagtcgttttcctcgtctccaatagccatgacctgacttttatccagagcaaggtaatcagtcaagagtctcaaacctacagccttatgaacacctttaggcatgacctctaggataatttcacgagacttaaagacctcaaacgcttggtataaatggtcaggtattttttgaatttgagcatccaaaaacgcttcctcacagaccgtaactaccttattatagacgatattttcaggaatgtcatcaatactctccacatcaacgaaggtcagggtaggattagcctgacgatagagagaatgattgcctttacttggcacaccatagacaatgccatcactgataacatccataggaagccctagaggttcgaagacagcataaatctgctttaaatcttctcgactcatctctttctttatgaggatatccccattattacgctgaaccaagccaccattgaaggtcacactatagtgcttatcatccaacaagcccaaatcttccaagatatgagtaatagctggcagagggcgaccagtcgtaatgaccacatgaacccccttagcttctgccgctttcagagcagctctattttcagctgttacttgcttatccttagtgaagagtgtcccatctaggtccaaggccaataatttaatctcagacatctgagtccaccaatccttccatgtagtcaaagactgcaccgtctttatggtgaccaatcacttcgtcagctactgccttaatctcatcgcgggcattttccgtagcaaccgcatgcccagcaaaggtcagcatctccatatcattgagattatcaccaaaggctacaacatctgaagcttgacgccccaactcttgacaaagatggtaaagaccaaagcccttatccacacctttaaggataatatccatagaatcaaagccagttgtcacagctgtcatatcctcaaaaatcgtgttgaggtagtcaccacgttccataatggtatccccttggaacttagcagttaccttgaaaatatcatctgtaaccgcttcaaggtccgttgtcataacattttcatagtagcgttccatggccttaagataggctggatctgcatcgtttggagcataggcaccacgacgtcccgacaagagaattccctcgcaagttggcaaggctaaagtcgtatctgcaatttccaaataatctttaggttctagcttggactcaaacaggacttcacccttgtactgaaccaaggccccattctccgcaataatagctatgcggtccacaaaaccatcaaaaagctcctccaaggccaagagagctcggccagaagctacggtaaaaacgtaatctttagcttcacaagcatccaaaaggttatccaaacgtgctttgtcataggcaccaagatggtctagaaaggtaccatccatatctgttgctaaaattttcaaaataatctcccttcaggtcgaatatacttgcccctattgtaccaaaaataggaatataagtttgggaaaagccagagaaattagagaaaatatggaattttacttgcaaattcagtattttagttgtatcattatggtagtacaaaaataatactattatacttttagaaaggagtctcttatggcttggacatttgatgaaaaatcgccaatctatctccaaatcgcctatcgcgtcaaactgaagatagcttccaaggaattgagtatgggacaacaactcctacctgttagggaatttgctcaggaagccggggtcaatcccaacaccgtacaaagagccttccaagaacttgaaaaagaggggctggtctattctgcccgtacctctggtcgctttgttaccgaagatgaaaaactaattgatcaaaaacgacacgagattgcccaaagtctcatgaagaactttgtctctgagatgacagccattggttttagctcacctgaaatcaaatctatcatcactgactacatcgaacaaacaggaaaggacttgtagaccgatgactgatattgtaactctaacaaatctcaccaagacctataatggtattccagcccttagagatgtgaccatgtccatcccttctggtaaaatcattggtctcttaggaccaaacggtagtggtaaaacaaccctaatcaaaattttgaacggcctccttcaaccaacttctggtttagcaactattaatggatttcagccatcacctatcaccaaagctcaagtggcatatctacctgatacaacttatttggatgaaagtaagactatccaatactacttggacttcttccaagatttttacgctgacttccgctatcctcttgccttgcaactcttgcaggatttaaagctccagcctgatttgcgccttaaggacctctcaaaaggtaacaaagaaaaagttcagttgattttggttatgagtcgtgaagctaaactctatctcctcgatgaacctatcggtggagtcgatcctgcgtcacgtgactacattcttaaaaccatcatcaaccaatactctgaagatgcttctgttatcatttcaacccatttgattgcagatattgaatccgtcctagatgaagttgtcttcttaaaatacggtcagattgaacttcagggtgatgctgataatatccgtcaagcccatggcaaatctatcgacaaactctttagagagatgttccacaactaggaggtatgagcatgttttggaaattagttaaatatgaattacaatcggtccgtaaatggtatcttggcatctatggtattgccatcctactctctatccccttgggtttaatgcttcgaaaatctatttttgtaactgaacagagccaccaagaacctagtctactcttctttgctttcttcacactgatggtttttgctaccattatcgtatggggaaccatttatatagcaacaatagttctcattgtcagacgctttgcaaagactgtctttgggagagaaggttatctaaccaatacgctcccagtttctgctcaccaattaatcttgtctaaactcttggtagcctttattttagatatcatttcatcactcgttatactcctttcgattggaattatagctgctttctgccttgatatgaaagatatcctactagctaccagctactttggccagatcctaaaagagataggcgctttctacctcttcatcccttctacaatcttgtcaatgattgctggtatccttttctattacctctgtattagtatcggaaatctcttcaacactaacaaagttcttatgggatttgtcgcctttttcgccattcaggctatcctattctttattggtttcttctttggactcggtgcagccttgaccggagatgcaacatatactgcaattaataactcgtcatatatcattagtctagttcagtctctcattctcatcgcagcaagttactttggtacctactatatcatgaccaaacgcttaaatttagactaaagaaaaaccgtgttccttctggaacacgatttttttttgcattgaaaagacttatttactttgttctttacgataagtctcgatttcggccttgttaccccaaacgaagtgtcctggacgtacttcaaccatttctggtttatcgacagaatagtcgtgttggtttggatcataaaccttcaagactttcttacgttccaagattgggtctggaataggaacagcagacaagagtgacttggtgtaagggtggataggattgttgtagagttcttctgtctcagcaacttccacgattgtccccttgtaaataacagcaatacggtcagaaatgaaacggaccactgacaagtcgtgagcgataaagaggtaggtcaatcccaactctttttggaatttcttaagcaagttcaaaacttgggcacgaactgacacgtcaagggctgagatgggttcgtcagcgataaccaaatcaggttgcatgaccaaggaacgtgcaatcccaatacgttgacgttgtcccccagaaaattcgtgagggtaacgtgtcaagtgttcctcaagaagtcccacttctttgatgatttccttgattttagctttacgatcttcctcatctttatagagatggaagttatgcaaaccttctgacaagatgtaatcaaccgttgcacgttcattcaaactcgctgcagggtcttggaaaatcatctggatgcgacggataaggtcgtttttctcagaatgagataggtgaccattgattttcttaccgtcaaaaataatctcaccattactagtatcatttagaccaataatggcacgaccgatagtagttttaccactaccagactcaccaacgagggaaaaggtttcacccttgttgatgaaaaaattagcattgtggacagcaacaaatttcttgcttccttcaccgaaggaaatctccacatcttttacttcaactaacttctcaggcattgccttcctcctcatctcctaaatgtgcaaatcccatattagtacggattttttcatgtagattttggataacctcaggtttttcaacttttggtgcatcctcatgtaagagccaggtcttagcccagtgagtatctgaaacttggaattgtggtgctttttcctcgaagtcaatttgcatggcatagtctgaacgcaaggcaaaggcatctccaacaactggtgtataaagtgatggtggtgtccctggaatagagaaaagctcacccttatcgtcagccaactgtggcaagcttgaaagcaagctccaagtgtatgggtgacaaggctcatagaaaatttcctcaaccgttgcgtactcgatgatttcaccagcatacataacagcaaccttgtcagcgatacttgctaccacaccaaggtcatgggtaatgaaaatcactgagaaaccatactcctctttgagtgatttcaaaaggtcaatgatttgagcttgaatggtcacatcaagggcagttgttggctcgtcacagataaggacatcaggacgacaagccaaggcaatggcaatgacgatacgttgacgcatcccaccagagtattggaaaggatattcgttgaaacgtttttcagcatcaggaataccaaccttgtccatgtaatcaatggccatttttttagcttctttggctgattttccttggtgtttgacaatgacttcaacaatttggctaccgatagtcttaattgggtcaagactggtcataggatcttggaagatagttgcaatcttagctccacgaattgctgcccaatcttggtgactcctaagcttggtcaaatcttggccacgataatcaatagaaccactagcgacacgaccattttcttcaagcatccctgtgaaggtcttggtcaaaactgatttacctgaaccagactcaccaaccaaggctaaaacttcaccttcaaccaaatcaagggaaacccctcgaatagctgtcaaaacacggtcacgaacgtcaaattccacgacgatatcgcgagccgataatattacatttttattttctgtcatattggactcctatctatgcgtacgtgggtcactggcatccgccaagttttgaccgacaataaagagagagagggaaacgaggatcaaggtagtcaatggaatccagaagaggtaagcattgactgtaacgttctgtgcatagtctgaaatcaaacgaccaagactaggcgtcgtaacgggaagccccaaaccaaagtaagaaaggaaggcttcgtaagagataaatcctggcaagagctgactagccatagtcacgataactgatacaagttgtggcatgatatttttaaccacaatcttaggagttggtgttcccaaagtacgagaagccaagttgtactccaaatcacggtaacgcatgatttgaatacggatagtataagcaataccaatccaacctgtgacagtcatggcaaaaatcatgttccagaaacctgcacccaatgagtaagtcaagacgataacgacaaggagggcaggaatgtttgagatgatgttgtagatctccatcataatcatatcaaaggtcttagaaatcccccaaacagcaccaacgactaaaccaataacaacgttaatgaaggtagcgataacagcaataaggatagaattacgagctccaaaccaaacactgtcaaagagagacttaccattactgtccgtaccgaaccagtattgagcatttggatgcacataacgtacactaaagtcattaaccttagacacgtcattaaagtcaaattttgaaaacattgggtagataaagctcatcaaaatgatagcaatcaagattcccaacatgacagttgttgactttttcttgaagaactgacgcatcaccgatttccagtatgaataggccggcgcatcaattgtttcagaggcaaaatcatcgcgctttacaaattggaacttacttttatcaattgaagccattatttacctcctttagatgtcaatttgatacgtgggtcaatcatagtcataaggatatcacccacaagcaatgagaagatggtgagggctgtgaaaataaatacaagacccacaaccatagcgttatttgaagcacggacagagtcaatcaacattttacccataccagggtaggcaaagattgtttctgtcaaggttgcccctgtgataacactaacgatagatgctgggatccctgaaaccaaggaaaccatagcatttttgaaaatgtgtttattcgaaatttcttgttctgacaaccctttggcacgtgcaaaacgaacgaagtcttgtgactgcaagtcaatcatgtaacgacgaatccaaatggcaagacctggtgtagacaagagaccgagaattacagatggcaagacgtatgaacgccagtcacccgcacccaagatagggaaagaatctggaagaccaatctcagaaccaatcaaacgaatgatataaaccaaggcgatggttggtagtgaaagcaagaaagtcaagataccagttgacacactatcaaagagtgtgtttttaaagcgtgccatgtatgatcccaatggaattgccaaagcataagacaagaccaaaccaatcaaaccagcaatggcagaacttgtcaccattgatgggtactggtagcgactcttagtagctgtgtaagggtcgtcaccatagtaagaacgatccctagcatcagcctgacttggtgatttataagtacgagagtagatatctactgaagatactttcttaccagtagggaagttgacctcagagctttgtgtttgcccttgtccttgtgtaataacatcaagaacaccctgctcagcataggttgggtaagatgtaccaaggttcatcttcacaaagttttggtgaacaaatgggaactgactgttaaagtaaagcaagtatttatgcttagtccctgatccgacaactgaccaaccgatagctgggtcattttcaatacggatgtaacgcttcaagtttggatttgttttatctttaacccatccagtattgtcaaattcaaagaggtgcgtatagaagccaaatacacgttcaagcactggaacatcacgtgttgcatagaattgtttactttgcttgaattgatgcaaacgccagccatgtcctaaactatccacatatttttggtaaatagctttattttcttttgttggcttagtggttactgacttatcaagggagctagctttctcctgcaactccttggtgtcatagtaatcaatgtaacccatacgttcatagattgtattttcatagttagccttagaatcagctgtcttagcaatcttgttgtagttagggtcctgtctgaaaatcagacgcctcggcaccatggtatagataatcgtgtaggtcaaggccgtcacgacaaatattgacaatagagaacggagggttctcaataaaatgtattttttcatgtctcttcctttaattccaaaagaactttcccaatctaatgagaaagttccatcgtccttttatttaacgtgtttctcaaggtctttttgagctttttcgttggacttagacttttctttaagccagctttcacgggctttatcatagtttttcttagtgacaacatctttttgaggctcaaggtacttgaagtatctgtcagaacccttaggtcccacttgagagtaagcacctgagaatggtgtcaaacgagctaccattggagcagcacccttgttaaccataagtggcatgaagagtgagctatcttccaaccaagcttgtgcctctgcataacgttcataacgtacattgaggtcgcttgtttctttagctgcattatcaaccaaagcatcaaagtctttaagacctacttgagctgctgctgcattgttaggatcgtcaaatcccatgtaagtttttgtgttctcactagctgttgtcttgaagatatcaaggaatgttgatgggtcttcgtagtcaggcgcccaagcaactgaaatattgatatcccagtcttctgctgctgcgttagctgcatacaaagtactgttaagaagatcatcttgagacatttgatgaacgtctacaaccacattttctttaccgagtgtcttttcaacagattgtttcaaagattgtgcacgtgctacagttggttttgcagcttggtcaactggaaggtccaagtgaattgggaattgaacaccttgtgcttggagagcttccttagctttattaaattcagtcttagccttatcagcgttgaagagaccatcttgactgtctttaaggttaacacctgaccactcgtcaccatatgaaggcatcttttcagttaccaaatcaccgaatgacttgtcaccagcataaacaaaatcaggtttcacaagaaggttacgaacagcaagtgctgcacctttttcaccattaagttgtgctgaataagctgtacggtcaatagcaaagttaactgattgacggaagtccttgttaagaagagctttcttagttgaatctttttcagcatcagtcttcttagatgtatggttgtaagactgacggtcaatattaacaccaaccccaccaatatctgcagatggttgtgtatagaagatattatctttatattgtttttctactgaattaaagtttgagcttgttggatatagacgtgcttgactataagcgccatcagtgaaattacgaacaagcgattcttggtctgatgcatcatagaaagaaagtttaatgccatcgaagtggacatttttcttatcccaatagttttcatttttagccaactcaatagatgatttagctgtcaatgacttaaggatgtatggaccattataaaggatagatgatggatctgttgatttaccaaagctatccccttttgacttaaggaactcttcatttacaggccagaagagagaataagtcatcttagaattccagtaaggttctggttgtttaagtgtgtactgaagagtgtaatcatcaagtgctttaacgccgactttagaaaaatctttatcagtaccattgaaataatcagcaagacctactacagaatcttttgccaagtaaattgactctgtctttttatcagcagcatgcttaagacctgttacgaagtctttagctgttacttctgcatactcttcaccgtctgaagtataccatttaactcctttacgaagtttgtaagtataagtcaaaccatcagctgaaacagtccaatccttggcaatagaaggtaccaagttaccatatttatcgttttccaaaaggccatcgacaccatttgtcacagcatcagtcgttgaacctttattggaaataaggtaatccaatgtctcaggatcagcagtataaacatagttataagtattgcttgaagtgtttgattttgatgaacaagccactaaaaccccaacacttaggagggaaacacccgcaagggccaaccatttactttttttcataagcattctccaaaaattcttttttaatatgcctacattataccataaaaaataagatgagtacaattttcagaatattttgtcttatactgactttctcacaattttaccccttacgaacactatggattagccctttttggacaaaagaaaaaggctaactgcctttttctcaagaatattatttaacgtgtttctcaagatctttttgagctttttcgttagatgctttcttttctttaagccatttttcacgactttgttcatattctttcttagtaactactttttcttgtggtttcacatatttgaagtagtctgatgagttcttatcacccacttgcatgctagcacccgtaaatggtgtcaagcgtgagataactggtgctgcaccgttaccaacagtcaatggaatgacaagtgagctatcttccaaccaagcttgagcttgagcataacggtcgtaacgagcgttgaggtctgttgtttctgaagctgctgaatcaagcaaggcatcataatctttaagacctacttgggctgcggccgcattgtttggatcatcataacccatgaaagtcttggtattttcacttgaagttgtcttaaagatatcaaggtaagttgatggatcttgatagtctggaccccaaaccacaccgtttgaaatatcccagtcttctgctgccgcattagccgcattaagagtagcattttgcatatcatcagatgacaactggttgatatcgataacgacattttcactgcccaatgatttttcaatcgtttgtttcaatgattgagcttgagcaacattaagtttagaactttgatcaactggaaggtccaagtgaattgggaattgaacaccttcaccttgaagagcttctttggctttggcaaactcagtcttagctttttctgcattgtagagaccatcttgaccatccgcaaaattgacaccagaccattcatcaccgtaagtgctcattttctctgtcacaaggtcaccgaaggtcttatcacctgcactgacaaaatcagaaggaacaaagaggttacgtagagcaagagctgccccatctttaccattaacttgagattgataagctgtacgatcaatagcgaagttgattgattgacggaagtctttgtttagaagagccttcttagttgatgtcttttcagcatctgacttcttagctgagaatttatagctttgacgatcaatattcacaccaatagctgctgtagacgcacctggtgctgtgtaataaatattatctttatatttcttttctactgacgcatagttagagctcatagggaatacacgtgcaatgctgagagcaccatctgagaagctacgctcttgagcctcctggtcagaaccatcataatatgacaatttgatagcgtcgaaatgcacgttcttcttatcccaataattctcattcttagtcaactcgatagatgatttagctgtcaaagatttaagaaggaaaggaccattatagaggatagatgttgggtctgttgacttaccaaaatcttttcctttgttcttaagaaagtcttcgttaactgggaagagcaagccataggttgtcttagaattccagtatggttctggttttttaagggtatattgcaacgtgtgatcgtcgattgctttgacacctacatttgagaaatctttattggcaccagagaggtagtcagacaagcctgcaatagaatcttgtaccaaatagagggctccagctttggaatcagccgcatgcttaagaccagtcacaaagtccttagcagtcacatcagcatactcttcaccatctgaagtgtaccatttaacacccttacggattttataggtataggtaagaccatcttgagaaactgaccaatcttcagctacagaaggaacaaggttcccatatttatcagcttccataagaccatctacaccgttagttacagcagtcttagtaggtcctgtatttgaagtgatgtaatccaatgattctgggtctgaattataaacataaccataagtcgttccactagtacttgacttagaagaacaagccgctaaggcaccaacacttagaagggctacacccgcgagggctaaccatttgctttttttcataagatttctccaaaaaataaaattttactctttcattatagcataaataatcaagaaaaacagtcacttccagaatattttgcacaagcaaagtacataatgaaacacggcaaactcaacagtccattgtatttcctggatttctagctactttaatcgatttatttttaatcaccagtcatgcataaaacaaaaaggcctaacaccttggttaaacctctgtttctaagttaaaattagccattaagagcttgagcagctgtgataatcgccaaattgtaaatatcttcagcactagcaccacgagaaagatcgtttactggtttattaagaccttgtaagatcggtccgatagcttcgaacattcccaaacgttgggcaatcttatagccgatattacctgcttgcaagccagggaagacaaagacattagcatgtcctgctacgtcactatctggagccttaatagccgctgttgctggaacaaaggctgcatcgaactgcaactccccatcaatagccaagtcaggacgcatttctttagcaatatttgttgcttgaacaaccctgtcaacttttggcgatttagcagaaccttttgttgagaagctaagcatggccactttaggatcaataccaaaaactttagctgtttcagcagtattaattgcaatttctgccaattcttgagcatttggttcaatgttgatggcacagtcagcaaacatcaagcgatgatcggtattttcacggttcataaggaagacacctgatgtacgagaaataccaggttttgttttgataatttgaagggccggacgtaccgtatccgctgttgagtgaatagcacctgaaaccatcccatcagcaagaccaagtttaactagcataacaccgaaatagttgacatcacgaagcaatttttccgcatcttcgactgttgcttttcctttacggatttcaagaaatttttccttcatttcctcaaaaccttcataggtttcagggttaataattgtatagttaaagtctgcaaaaccatgatcgctcaagattttgtgaacctcagctgggtctcccaaaataataggatcaaccaatccttcaaatttcaaacgggctgctgcacgaaccacacggtcgtcgttaccctcagggaaaacaatcttaacacctttccctaaaatatgttcacgaagttcaccaaatagactacgcataaaaaaattcctcaatcaatcttttttagtttgtaagttcatgataacggtttcaaaatcatctgtcaaggaagatgcatggaccatctcttttttggtaaaaggatcaacaaatgcaagacggtgacaatgcaaggcctggcgctcaataccatagtctagagaaccaccataaagatcatctcccaaaaggggaaggcctaagtgggcaaagtggacgcgaatctggtgagtacgcccagtatgcaaattgatatcaaccagtttaaccctaccataatcacctaccaaacgataactagtgtgggcatatttccccgacttatggactcgacgtgtgataatggaatccacatcacgcgcaatcggtgcaatgatttcaccctgcttctcaagtttggtgtcaccttcaaccaaggcatagtaatgtttcttgatagacttctgttgtaactgtttatccatacgagcatgggcgtaaccatgcttagcaaacagcatgagaccagaggtgtccttatccaaacgtgtcacaatatgcacacgctggttgggataattattgctgacaaaatgatgtttgacaaaattagccatggtattatcgtggttaacacttggaatactagcatagccatagggtttattaatcaccaagaagttatcatcttcatagacgatatccaagtcaaaaggaattggcttcaaggtttcatgcggtgcctcgtcagggatttcaatgacaaccacgtctccctcatggacaggataagtcgcaaactgctcctcgccattgacccaaatatgaccaccttcaaacttaatcttggccagaagtccttttgagatatcatgctccttcaaaaaggtcttaactcgacatgaacgtcctacggtaaattcatatctcattcttccatgtctccaataaaggaatcacgtacgcgttcccaaaaacttgtgtgactggcactagcaacaaaagaaatctttcgttggtcgattgaaaattctacctttttcacattacggttggtataggttttattatcaacggatagagtgtaacttcccattcgggtaggataaacggtaatcttctcgtgcttgggcacaataaggggacttcctaaggtccggtacacacgattattaagactggcaatctctgtcagttgcaaggcttcaatagtgggatgaaggaccgcaccacccaaggatttattgtaggccgttgatcctgtaggcgtcgacactgacaacccatctccacggaagctctcaaacaagacatcattaaggcaaacatctgctgccatggttttctcattacgcttgatggctgcttcattgagggcaatcgacgtaaaagaacgaccatcagccagggtcaatttgacattcaaaagagggtaagaaatctttgcaccactatcttttcgaagcgtctcgattaattgatccacttcactgtccaaataatccgtataaaagcctaaatgacccgtgtgaatccctacaaaacgcacacgcgcaagctctttttcatacatatgaaaggccgatagcaacatgccatcaccaccaattgagatgaccacatctggatttttcttggtcaaataaaaatcaggatcatctcgaaaggcattaaaaagtttcgaggcaacacgcctactttggggtttgccattggcaataatagctaccttcatctcatccgaagaggtcttcatctgtgtcatcactatttcctacactatccttcaaagttctattaattggatcaaagagcaactgggcttctctaatatcatcacgtatcttccgcatttcttcgtcaagctcataagccatgcgggccgtagtttccaagcgaagtttaatctcctcaggaaaattcccctgatacttgtaattaagggaatgttcaatggtggcccaaaagttcatggccaaagtcctaatctgaatctctgcaagaatctccttacgaccatctatggtatcaacgggataagatataataacatgataagagcgataacccgaatttttacggtttctgatatagtctcgctctgaaacaatagtcatatcactacgatgacgaagcaaagccaaaacctcatccacatcatcgacaaattggaccatgactcggagaccagcgatatcctgcatatcttgagccaaattttcaatcgaaaggccacgaagggcgattttctcctcaatggaagccactgacttcacacgtcccgtcacaaattcaataggcgagtgacgattttgcttacgaaattgtttacgaatgcctcggagcttgattttgagctcacctacggcctgaatataggggtctaaaaattgttcccaatccatggtcaagataggactcctccttgtcaaaagctttagttttttataaaataaatacaatctgttatattataccacatttgaaagcacaagggaggacacacatgaaccatttagagatagagtacaagactctactcaccaaagacgagtacaatcgtttagcgatgcttttctcccatgtgacacctgttacgcaaaccaactactacatcgacactcctcagagtgacatgagaaataaaaagttgtctttgcgtattaggacacttcccactcatggtgagctgaccttgaaaatccctgaaaaagtcgggaacatggagtacaaccttaccatggactgtgcggacgctaaggctttgactaagtcgctggacttccctgattgtcagatcaaatccattcttctggaacgtggggttaaactagaggacctaaccatcctcggacatttgaccacaactcgtcgcgagtaccaaacaaacatcggtctcatggccctcgatgtcaatgtctatgctgataagaaagattacgagcttgaactagaagtttcggatgctgagaaaggtaaagacgactttgatgctttccttaaagaaaataacattgactttaagtatgcaaagagtaaggttgcacgctttgtagctaccctcaaacgagacaaagactaaaagttagacaaggagttagctccttgtcttttttttatgtttaaacacatgcagcgttaaataccacaagtatttagacttccagaggggaatagatttctctaaaaacgcatacaaaggaattttatctaacaaaggttcggtatttttcactaatatcatactttgatggctgaaatttctgcttctttttgctaaaatagaactatctgtagttttattacaatagccctaactgggcttagcatcttatttttttaaaggagtcaccatcgtcatggtacatcaaaaagcaaacccacaattgaaattgttctcgctcagctcaaacccagaaattgctgaaaaaattgctgaggctaccggattgccacttggtaaagtatcttcacgtcaattttctgacggtgaaatcatgatcaatatcgaagagtctgttcgtggggacgatatttatatcatccaatctacaagcaaccctgttaacgaccacctttgggaattgctcatcatgattgatgcctgcaaacgtgccagtgctaactctgtcaacgtggttatgccttactttggttatgcacgtcaagaccgtatcgctgcttcacgtgaaccaatcactgctaaattgattgccaatatgctggttaaagctggtgtcaatcgtctcttgacacttgaccttcacgctgtccaagttcaaggtttcttcgacatcccagtagataacctcttcacaatgccattgtttgctgaatactacaacgaaaaaggattcacaggaagtgatgttgtcgttgttagccctaaaaactcaggtgttaaacgtgctcgtagcttggcggaataccttgatgcaccaatcgctatcattgactacgctcaagatgattcagaacgtgaagaaggctacatcatcggtgaggttgaaggaaaaacagcaatcttggttgatgatatccttaatactggtaaaacatttgcagaagctgctaaaatccttgaacgtggtggcgttaaagacatctatgcagttgctagtcacggtctctttgcaggaggtgctgctgaagtcctcaacgctgctccaattaaagaaatcttggtgacagattcagttgcgactaaagaaaaagttccaacaaacgttaaatacatttcagcaagtgagctaatcgctaacgctactactcgtattttcgaacgtcaaccacttagcccactctttgcttacactgcaaacgaggactaagctatggtttatttggacaatgcagcaacaactcctttaaatactgctgctatctcagctatgacacatgtcatgactgaaacctttggaaatccatccagcctccatgcttatggtcgtcaagcttccaaggaacttcgtgaagcccgtgaagaaatggccaaccaatttgaagtccctgctcgtaaactcattttcacttctggtgggactgaaggaaacaatacagctatcaaaggttatgccctagccaatcaagctaaaggcaaacacctgattacaactgctattgaacaccactctgtccttcacaccatggcctacttggaagagcgttttggttttgaaataacctatattcaaccagaaaatcaagtcattactgcccaacaaatcgctgatgccttacgtgacgataccattctggtttctgttatgtatgccaataacgagaccggccaattgcttcctatcaaggaaattggtgacttgcttgccaatcaccaagctgccttccacgtcgatgccgttcaggtagcaggaaaacttcctattcatccagagcaacttggagctgattttctctctattagtgcccataaattccacggacctaaaggtgttggcttgctctatcataacgatttgcattttgacaacctactccatggtggtgaacaagaggaaaaacgtcgtgccagcactgaaaatctggtcggcattgcaggtatgaccgctgcttacaaacatgctagcgaccactaccaagacaattaccagcatgttgaaaagattcgtcaggcctttctagatacccttaccgttccttatgaaattaatggtggagaatctagcctacctcacgtcatcaacataagttttcctggtaaggaaaatggccctctcttaaccttgttagacctagctggctttgccgtctcaacaggttctgcttgtactgctggaactgttgaccctagccacgtcatccaagccctctatggcaaggattctgacaagttaaaaacagctattcgcattagtttatcagaggaaaataccgctgaagaactccaagctctagcagaaaaacttaatcaaatcataggagactaacatggcatttgaaaaaagcattcatttgactgactgtaaataccgttacaccatcagtcctaatgtcaaaaaattcaccctacgtgatacgacttttgtgcaaaataaaatcggaaactacgagttgcaccgccttctcgaaaaagtgcctaactcaggcgaaggtttcccactcaaaatcactattaacaaagacttgactggtttcaaattgtcgattacagacaaatctggccttcgtaacgttaatatctttaaaaatgaagatcatcacatcttgcaagagaaattctatttcttgatgcagagtttggttgatcgtaacgttttcgagcaagaagaagtctaaacttctttcttaatacatagaaatagcctatccttgtgataggttttttatatcgcctcatctacactattttgttgcattcttcacaaacttttcttaaaatataagagaatcatactaattaaagaaaggaaagcgatcaatgacatttgagaaaaacatcccaaacgccactgccaaacgtctctctctctactatcgtattttcaaacgattccatcgtgaaaatatcgataaagcaagctctaaacaaattgctgaagcgattgggattgaccctgccactgttcgtcgggacttctcctactttggtgagctaggtcgtcgtggttttggttatgacgtaaacaagctgatgacatttttcgctgaactcctaaatgacaatgcgactaccaaggtactcctcgtaggtgttggtaatgtcgggcgtgccctcctccactaccgttttcaagagcgtaaccgcatgcagctggtcatggcttttgatacagacgataacgaattggttggaactcaaaccgaggacaagattcctatctatgggatttcccagattaaggacaagattgcccaagaagatatcaaaacagccatcctgacagtgccatcagttaaggcccaggaggtggctgatcttttggttgatgctggaattgaaggcattctctgtttctctccggtcaacctcaatcttccacgccatgtagtggtccaatatgtagacttgactagcgaactacaaaccctactctatttcatgaaagaagaagaaaaatcaaggagaaacaatgactaaaccaattatcggaatcactgccaatgtaaggcctaatccagcccatgaagacatcaactggtcctatgccccaactggctttgtagaaggagttcaaagagccggaggcctagcaatcctactaccagtatccgatccatcggaagccaagacctatatctccatgattgacaagctcatccttatcggtgggcaaaatgttgaccctaaattctacaacgaaaagaaccatgctagtgaagacgacttcttcctcgaacgtgatatctttgaaatggcactcatcgaagaagctactaagcaaaagaaacccattttttcaatctgtcgtggaacccaactcatgaacgtcgcactaggtggtagcctccaccaagacatcgagaatcactggcaggacaagccttctgattatctctatcatgagatgattgttgaagaggacagtaagttagcagaaatttacggacgtgaaacctctatcaactccttccaccatcaaagtattaaacacctggcctctgaccttcgtgtcatagcgcgtgatcctgaggacaacactgtcgaagctgttgagtcaaatactccagaccttcgcttccttggtgtacagtggcacccagagcttcttctagataaacgtgaagaagacctcaaactctttgaatacgtcgttaacgaactttaaaagcaactgagactgcactcagttgcttttctcttgtctttatcacatcgcctcaacctaaagctcaaaatcttccctctcctcacgaaaggaataataggtggatttgccaacaatcagatgatcaagcagacaaatccccaaatcatcgcaagaccgcttaatcttttgcgtaaaatcaatatcattgcgactcggataggcctcacccgacggatgattgtgaaccacaatcaaagacgttgccatcagatgacaagcataatgtaaaatctcacgtggctcggcaatcgaacgacgaacaccaccaataaagaccgtcttttgctgaataatacgattctgcgtatccaaatagatagccaccagatgctcctgaggcttgtccccaatatccaacatcatacgacgggccacctgctgactggacataatctgctcggaacgagccaactcagccttctcaatccgcttagccaactccaccatagccttcagttcaatagacttcacacgcccaataccaggaatctcctgaagctcattcaaggacaaacgagacaaatccgccaaactcgtcatccctttcaaaatacgattagccatagataagacagactcagacttggtccctgttcgcagcactatcgccaacaactcctggtccgataaaacctctgctcccttctgtaaaagtcgttcacgaggcaaaagccccgactcctcagctacaatactatacataagaaaaaaacctcctacttacctattcgtaagtgggagggggataattactatttcatagtatttttactactattagatgtaaatctacgttttattcttctcaaaacatacttcacagcggttcctggacctacaataatatacttgagagcaccttttataccaccgatattatcaaaattaatataggtatttggtaaagtatcaggtcggatattcaatacaacattatctacaaaaggcgtaataaagatatcattttttgcaatggcataatcataacgtcttgcccatgcaaggtaaactagaatacgctcaattgaatgcaaaatggtatgttgaggaattggttctgctgggatttcttcatcttgcaaatcaaggtcaaacaatggttttaaagcatcgtacttgaaccaaataaatgttccataactcatgataaaagtattcatcttatcaaagtcaatatctcgaccaagattcatacgctcccataaatcattcattccctcagcaaaacgattctcattccaaggatccacaattttagtataacggaagaaacttggaatatcagcaatcactagacctagtctatcatcacgttctaagttcgcaataatgttatcagcaggttgaattaacattgagaatagttcatttcgccatgaatctccaacccaataaggatattctggtgattttttagtatggaaatgtccaatataatcataagcagaaagttcatctttcaacttaagcattggaataacatcacgtccacgatttccagtaataaagattcgagctacttttccattcttatcaaggatagactgaatctcttccttcttctcttctgaatccgttgttaggaagagatcataagtaaagtgaaaattctcaaattgctttaaaaagtcttctagtaaatcaacatagtaggtatgaagatgtacagcaattttttttgtgtctgaatatgtctgtgagctttcctcaataactttgcgatcaagtaaataaggtggagttggtaaactcatatccgacatgtgagacaaaatgaattctatcggatagtctgttctattctcgatttccttaagcaaataaggagcgaggtgctgggttaaatcgaatgtcttaaccttaatgaacggaacccctgcatcaagcaaaacatgaggataatgaattgtaaaattactatggaaaaacttatcatttagtggaatcgtattaagaatcgattcatacttaaatccagcatccatgaatttcttggtataaagagtttcataattatcaattactttttgaacatcttcgaaactctcaactgatttccagaacttttggaaaacactagattcaactaaacgttttttaaatgaaataaagtaggattgcaaatgttcatgaatataaatatcaccagccttgattccttgatgattagtcataccccaaaaatctacatttggatttgattcatagttatcatagattggtgccatatcccatagaggaccaaaacaggtatcattcataacagtgacagaatcatactgtttcaagttatcaaatccaacaaattccataccatcatgccaagcagcaaaatcgtatcctttattttcacgttggataaaatcatcaatcaagtgtttatcacgaagtttctgtacttcactttcactaagacgactatttgaaataaaaaccaatttatcaaacaacggtctcatatgttcaagttgataaaatacatgtcgactaatatgatcatatttattgaaatgaacataaagcaatagacgtttcatttacttctcctaaagaaattaataattttagttggtattgtccatcttctcgaagtaacaacactgttatattggatttgtaagtcatcatatagactttgtatacgattcaactcactttgaaaatcttgattttctttcttcaagacttcaatatactcattttgatcatgagaaattcgtgacacctgattcagtcttaaatctaaatcttctatctgacgatcttttttaaaaactaagatatccaaatcacgatccttaacaagtgctaagtgtgaaattctttgaatatcctgatctggatacttgttgagatatttaatttgagattctaagatacctgtgaaccgcctttcagcagtttccaatgtcataggttttgaatcagatcccaaattcatacgatatacagtagtggaatcactcaaaaaagaaattttagtgcgtttgaataattcaagttgcaactcaaatgtatcgtctgcggctgtatcgctaatttgagcagatacatcttgcataagagtggtatcaaccaaccaggttgaagccattgtcattcctttcatgacaagcatctcttcgtaagaatcaattaaaggaagtgccttactcgcaaaggcatctttttggataagatttccgtctaggtctaccatgtcaaattcggtatttgaccatagtgaatctgttgaagcatctagcaaatcaacttgcttttgaagttttaatgggtccgtccaaaaatcatcactatcacatcttgcgatgtactgtcccttagcttcttggcaaacttttttccaagttctagtaatgccaagattcacttcattacgaaaagttctaactttttcaggaaacttattttgatactcttgaataagctcatacgaatgatctgttgaagcgtcatcaatgataataatctcgaaatcaaaatttgttttctgattgagaaagctatccatagcttctcgtacccaatcccccttattataattggtacaaataatcgatactttcattcaaactttcctttttctcttaagaaaaactccacttcccatttctttgaataataccagttgcagaatctttggctgactcgtcatcttcatcaatatcatccctatttagaacaataactggaatctcatcagctggaagaaaggctagaacttggttattcgcatcccttacagtaatttcgagttttaacttaatatcgtttagccctgccagtgaacactgatagtttactttaacatcacccttgccacttgttaaattatccatcgtattatcattgtaaatccaaatattacgatcaatatctgtaaatgagatagcaatataagtaggcacatcttctagcagagtatacatcaaatcaaatgaaattggttcatttggtgtcgctctcttagaagacaatagtgataacttcagattttccacaactgaaccacttctttcaattcctgattgttctgaagtgattacttgttctgtattgtcaaaactatattgattggcaacgtctctaggctcgcctttggctttaatgtatccgtcctcaatcaaaatagccttgttacagtacttcttaacagctcccatatcatgggttacaagaattgttgttttccctgatttcttacgttccataaagtagtcattacacttacgttggaaggcttcatcacctactgcaagaacctcgtcaaggataagaacatcaccctgtgccttgatagccacagagaaagccaaacggacctgcataccagacgagtagttcttgagtttttggttcatgaaatcttcaagctctgcgaactcaacaatctcatcatacatggcatcaacttctgccgtcgtaaagccaagcatggctccgttcatataaacattctcacgtccagttaattcagggttgaaaccgacaccaagttcaataaatgaaaccattttgccatttacggtaaccgtcccttgttcaggaacataaatttgagaaataatcttcaataatgttgatttccctgaaccatttcgtcccacgattccgaagaaatcaccttcctcaacttcgaagtcaatgtctttcaagacatgttgttctttatagcctttgattcctttaaacctatttactagggcagttctaagactttgagtagactcaaccggtaatttgaaaaacttacttacatggtccactttaactgcaattttcttttctgtcattagagaatctccgcgaattttttagcttgatgatggaaaatgtagtaaccaatagcaaagataacaagtggtaggaaatacggaatgatagcaatagccttatgtccaattaaatcccaaccacgtaagctacctgagaagacaataaaatgtcgcaagtcctgaataatttgtgctaaaggattcaacatcatcagttttgcaatcttaacttgtccacgttgcaaaataaatgtcaatgaatagataatgggtgtcgcatacataccagcttgcataactacttcccaaatcggaccaatgtcacggtacttaacaaagagcgttgctaagacaaaggcaataccagctgagaaaaggaaaagttccgcaaataatggaataactgtcaaccatccaactgaaaaattaacaccgtttaccaaggcaaaaacaaagacaacaagtaggttgataatatagttaattgaagccccaacaacagatgaaatgacgataatctctttcgaaaaattcaattttcgtaacaagtcaccccttgatacaattgacatcatacccatactcgtcgcttctgaaaagaaactccatgtaaccataccaattaagaggccaatagcgtaatgcggtgttccgtcgtcaaaacgcaagaagcgaacaaacactaggtacatgattgtaaagagcataagtggtttcaaaatagaccacaaatgaccgattaaactaccttgatagcgcaatttgaaatcggttttaaccatttctcgtaacaaaatacgatttttctgactaaaaaagtctaacatctttctctcctctatatgcaaactttgtaagaatcaatgtcgtaaacacagttgtgtgaaaagctctattttttcgataaccgtattttcggatacgtgctaaacgttctctaaatggagcatccataattgtcacaaagttttcaatgatttccttattctgtgaacttaacgggagttctaacaaatttctagcctgatcttgactagctttgataagactccaatatttggcaaaaaggatatggggtctaacccaatttttcatccgctttcgcaaagttcgggcgccaaggacattactgctatgctgacgataaagctcggttggctcatcaatatagactaagttaccaaaggcagaagctagcaaacccagataccagtcatgcatcagtaaatcatgcttttcctcaccagtccatagttctgctaaagcatggtttatcatagcaacgccaccagtaactgtattttcagtcaactcttgaatcagctcagtattcgcatggtcagactgagtacgaatcatactctcatgcaggacagataaattttcatccactacctttaaatctgtgtaaatgagtaaaggtttatcctgagaatactttttggcttctgccacttgaagtgagattttttcaggaagccaaaaatcatcctgatcactgaaacagtataggtctgcctccccatgcttaagtaaggcatggaaacttttgattacaccaacgttttcaacatgattctcattgataaagtgaatacgtgaatctcgtgcagccagttgtttaataatttcaactgtcccatcagatgaaccatcgtcacgtatgagaagtttccactcttgataggtttgctcttggatactcttcacttgttctgctaaatactgctcaccattgtaggttgacagtaagatatttactttcatgataaaaataactcctcgtactcacctacaatttttttccaagtaaagttctgttccatgttctccttagctaactttcctagttcagagtaatctaaaacaccatctacttgatcaatcaaataggacagattgccctcatcttttttccaataacaagctgtatcttgagctactgaccggttaaatgagacgcctaatactaaattcaaatcagtttgtgccatagcttccagtaagccagggttggttcctccaacttcatgaccatgaatataagcaaaggcttctttgcgaatatattttaataggtcttgatcataaactgttccaacaaacttcacacgtggatccgtatcaaactgtgttttagaacgcaattcctcaaaataagcattgccctcatgattacaaataataattaaatcacgttttgttgaggaactcataaactcacgaatggccgtttcatagttattttctggaacaaaacgaccaagaatcaaataatagtttttctcgtaagtgttccacgtcttgtaaatatctctaactttagcatcctgatttgtaagtcttgtcggtgataagtctgttccataagcaatataagttgtcttagaccacggataggcatcttgaatataagtttcaatgcctggattatccgagataactaaatcagcatgtcttgtcattactttctcagagtactttagataagcttgtactggcttgggccacttagctcttttccactccaaaccatctggattaatgtagaatttaccaccaattttatgaatcttagtagcaaagggagccacaaaagcacctatagtatttcctagaacatagaaaatcggttcttctatattttcctcatggattatcttcaaagcgtaattaatagccatcatatcataggcaataacgcgagccggtcctaatttcggtgccttaatcgtgaaacaatctacacccttatattcgaaatgctcataggccttttgatcagaaaggcaggcaacatggtatttaacttgggatgaaacttggttggagactaattgatctacaaatgtctcaaaaccaccgtattttgctggaagtccacgacttccgataatgaatacgtgttgcataaatcccctttctaacaagtctataatctagtcaattataccattttacaaagcttttgcctaatgcaaacagaaaagcagccactaaggactgcttaaaaaaactatttataaaatgctagaaattcagttcttcacaccgtaatactgaagaattgtcaatactactgacatcaatataaacagattggcaataacataaacaaagtattctcgtctatcaattgtctcatcgaagtctatgttattttgaggataaaatactcttgaacagttaacaaacaaacctaataggagtaaaacacctgtgaaataacgaccttgaacacctgcaaaactaatatcagcagtttggccccacataagatatgaagtcattaaaataccaaatgaaattccaatagctacaagtgcagtaccaattttactaatttttggtaaaggtaaaggttgaggaagcattaaaataatagaacttacaaagataagataataccacgaaatattacctaaaccataggttaaccaaccgaaagtaaataatgaccccatcttattgggaatcaagtcaatccattcccgaaggaaggtcttgaaaaagacgttagcatgtgcaatagtgaattttatcttgtccactgggtttgcaccatgagttaccttacttgcattaatatcactcgattgcttcaaccataagaaacttaatatggcggtaacaaaaattaatagagctgcataaagatagttcttcttaattgtcatcttttcctttggtataaacaataataagcccactaaaagaacatatggtaatttcatcgttgctaaaactaagctcagtgctgcaaaaatgatcatatctcttaaacttactttttgttctctatttatcagataacagaactgtgctatcaaataaaacgttaatgcgttaaccattccatcagtactgaaagaagccgctaaataaacacacattggtaacaaagcaatggtgccaaaaagaatttcaaaacctttagctttctttatagcaagacgagtaattaaggcatagcaaactaaattacaaaatcgacctaaaataaccaaccataggagactaagtcctaggattcttgctatccaaataccaatcacttgaggaatgtaagggataaaagatgatgcattggtaacaataaaaagtgaagaatgtacctttttaaaagaaacttttatcttatctaaaccagtttgctttaaaggcaccttaaactctttagtaaccttactaacatcatctgagacttttaaatccttgtcttttttcggtagataagcatggaaatctgctacatataaggcacgagcaaaatgtgcattctcatctggaatgtcaaggttaggggaagaaacaacaaataaacttcctgaaagtacaatagcaatggctattttgttataaaatttccctggcaataaaataatgatagaaaagaatatgcctgttactaacaataaacttttaggaagattaaccagacttccccctaaatatatatatgttattccaattgtaagccaaaccaggataacttgcacccagtgttttcgtaaattcttcaaaaaatcggaagaaacttcctgcatttttgaagcaataaaatctgtttgcattattactcaactacctttcacttttttgatgactggccaaacaccaaaaccaccatatttcaaaaacttcaaaaagaatggaacaacgtaggataaggatgaattgatatttactttttgaacaccacgtttaacatacttatttttatcccaatgttttccaaaatatttttccataaagataacaatatctttaaaatcttgttttgtagcctcagggtaattcaacaaacgatacgtatgaccaacacataaatgctcaattgctaaatattgtagttcattcttatactcctcaaaatgatttccaaataaattaaacagatgagttaacgagtcataaatatcaaagatattagatttacttgaattcataattgacccgggagtattaataacataattaataagtggtttctgaatataatggattttctcagctctactagttaaatagggcataactgcaaggtcctcgtataacttaccttttggaaaagtaatgttatcgtataggtcggtcctacaaatcttcgaccatgcagcatgtttcacaaccatgaaatcttttttcttatcatacttatcaaatttaggattaacaattaattcttttaccagatttccttcatagtcgactaaattaatatcgaaaaatattaaatcatagttacttgatttatatttgttaaactctgttaaaaaagatctatcccaaaaatcatctgaatcaagtgacacagtataaagactatcgtggataaactgtaagccagtatttctgacatcagctaacccaccattttctttattaaaaatctctatataaggatatttctcaacaaattcttctattattttttgagatccatcagtactcccatcatttatacaaattaccttaagggaacacttttcaatatcatcttgatttacaatactttctaaacatcttcgtagatatttttcagtattatatactggaataattacagtcaaatcgtaagtcattgtcttctctctttaattctttctctaaaataaataattgaaataccaaacacatacacaatcataactactaaaaatgctaacgaagcaccaagcatcccccacgaatagataaatgtcttagtaattaataaagtaacaactaacatagcaacataaatagcaatcagtaggtgttgctttcgcataatggtaaggatgttttcaaaaataatcgcgacagcgtacaaaactccagctaaaatcaaaattgtaaatggtacctgataagatgctaaatctaatccaaagactagtcctaatacttggactcctagtaaataagctaaacaaactactagtaacccaccacctatgatataaagcaaaagtttttttataatcgaatcaaacttctcgtattctttgtccacatacaaaaaagcaagttgtgtaatcaaaggacgaaccattagaataataaggctcatgaaaaagacaggcatgaagagaatattgaaatctctttgcattcctgtttgtaatactccctcagataaacctcgctcaatgattaacttaggctcattcaaaacataaagtagtatgaaaccgttcaagaaaagtgggaaacactccttaaggatatccagagactcatgaatcttccttaggtcaaatactcctctccaattaattgattcgaagtgatgaacaaacctaaactcatataataaaataaaaagtccattccaaatggtcaaagctagcaaggatataataagagattttgaaataagcaaagcaagaaacaagaccaccgtactagtcgaataacgatagaacatggtcttccctgcaatatccatacgctcacgttgttgaaacaacccctgaaaaagatcagaaactgaatcccaagctcgatataaaatcatcagaaacgccattaaaataacagacgaggtatatctatttcctcctattatctttaaataaggtaacagtgttactatcatggcaagtatcgttaaaatacgggcttgaaagtacgctctaaacgaatgcttctgccttacatctgttccatgataatttcgaacttgaaaaagaccgataactacccagagagtcccgatagaccataccaaactaaattggtcagctagagacgccgaagtcaatcgagtaacgattaaaagatataaaaccgatacacctgatgctgctaaatttcccagcagattccaaaaatatatcgtttttgcatctggaagctgactttttttactcatcttttcctctcaaggcaattgtttgtactaagtttttgaactttgtatcaagtttagataagcgaactgttaattgatattgattaatcagtagaaggaaaatgataaaaaggaaaataaagtttaccgccgaaacaattcctaatgctctcgcaatgatctcagctaattttggaaagacactaaatacaagtaataccagtgagaagaaaatccaaaatagtgaatcgttgatttgtacttgagattttcgaatccctctaagaatgaaggtaactgtcgctagagatacaaaaattagaacaatttgaaaccaaatagtcatggcatctagcctcgctttctaaagttttgaatgagtaggattgacacaaacatgtgtgtcatatatttgatagaacgagaaagggtcaaataactttctcccgcttgtctatcttccattctaacttgcgcttccgcaacttttacaccattacggatgagataagaaacggtatctggctctggaccatagttaatattgagtgcaaactctttaattaaatcttctgagaacattctcattcctgaagttgggtccttaattgtcttacctgtggtaagtttaatagctgaactaattaagatattacctaacattcgtaaagaatttggtcgtttctctgtaacaaatcgagaaccaataactaaatcaaagccatcattgattttttcttccagaccttgaatatattctggtaagtgttgaccatctgcatcaaattgcaccgcttttttataaccatgctcatatgcatatcttaaacctgtttgaaaagctcccgcaagaccgagattcactggcaaatcaacaatattgtaatgattctcatggcaaatttgtgaagtcttatcacgagagccatcattgataatgacgtagtcatattgaggataattttgaatgatgttgttaacaacattttcaatcgagccttcttcgttataggctggaataataatgagtaaatctgacatttttatacgtagtttctcctgaaaactctattaaaaaggtcagtcaaatatattcaaatctatttaactgaccttgattcttacttcacttcttgtttgtaaaactctttcaaagcatcttgccatgttggaatgacaaatcctgtagccttagccttagccaaactcattgttgagttaagtgggcgtttagctttggctgggaactggcttgaatcaacaggtttcacttcaacatcagtatctttgaggatttcaaccgcaaagtcataccaagttgtatcttctgctgcatcatttgacaagtgatagtaaccatattccttacggttttcagccaaataagtcataaattctgccaaagtacgtgtccaagttgggcggccatgttggtcattaacaactgtgagtgtcttgtgagtcttagcaaggttttgcatagtgaagacaaagttcttaccatagttaccgaatacccacgcagtacggataatgtagtagttagtcacatgcttttcgactaactcttcacccatgcgttttgtacgaccatactctgtctgtggatctggtttatcatcaacttcccactcttgaccgactggtttttcaccatcaaaaacgtagtccgttgaaatataaaccagcgttgcactatgtttttcagcagccttagcaacattttcagtacctgtcacgttgatagcatagtcaagctctttaccttcatcttcagcagcatcaacagctgtgtaagcagcacagtgataaaccaaggttggttttacttccgcaaatacttcatctactttggcagcatcagtgatgtccatttctgccacatctactgctacatattcttcgttacgttcgtcaagaaggtggcgaagctcagttccgagttggccatttgcacctgttactagaatcatatttttctccttgtaattttcattaatagcactttaattttatcaaaaaaagcagaaaaaatctgctttcataaataattctatacaacaaatttatttgtataaatagctggttatcttcaccctttttctttaataacatacaccggtcgtttcttggtttctaggaaaatctttgaaatatagttcccgatgatacccaaggccaggagttggattcctccgataaagaggatgattgagacaaggcttgcccagcctgcaacacttccacctatggttagttttcggataacgacaaagacaattccaaccaaggagattaagaatgagaaagttcctgcccatgtggcaagcttcaagggtacttctgagaagttgataaagccatcaagtgagtaactcaataggctccagaaagaccatgaagtctctcccgccacacgttcacgattttcataagagacataggccacgtcaaagccgacccaagaaaagaggccttttgaaaagcgattcacttccttgagctcaaggatagcatcaacaacctgacgagtcatcatgcgaaaatcacgtgccccatccaccatttcagtatcagaaactttattaatcaaccaatagaaggccttagcaaagagtgaacgaataggtggctcacccttgcggtctgcacgtcgtgtcccgacaacgtcgtaaccttcttggattttagcatacatctcgatgagcagttcagggggatcttgaagatcggcatccataactgtgacgtagtcaccttgggcagcttcaagtcctgcaagtaaacctgcttccttcccaaaattacgagagaaagagagatagtgaacattctcaaattgtttggaaacctgtctcaaaacttccaaggtgcgatcttttgaaccgtcattgacaaagtaatagttgaaagccaactgattggccatttgtcgctcaactgcctgacaagcctctaaaaaaggatgaatggtctcttcctcgttataacaaggaacaacgatagccagtgttttcataagatttctcctaacgaatacctagggcgatacgagcataacggctcatcttttcgatagtccaagctggtgtccagaccaatttaacctctgtcttagtgacttctggcacttctttcatagcgtcataaatttggtctgtcaaaaggtctgccagtgggcatcccatagtcgtcaaggtcatatcgatttcagtatagccatcttgctggaaacggatatcataaataaggccaaggttgacaatatcaatccccaactccgggtcaatgaccatttctaaggcttccaagatacggtctttgattttttcaatttcttcttcagtgtatttcacttcagacatagcttttcctccaaaatcagggcccaacaatcaggccccttccatatactatcttagtcttcaataaagtctttaagttgtttactacggcttgggtggcgcaatttacgaagggctttagcttcaatctgacgaatacgttcacgagtaacgttgaagactttaccaacatcttccaaagtacgcatcttcccatcatcaagaccaaaacggagacgaagaacattctcttcacggtctgtaagggtatcaagcacttcatccaattgctcacgaagaaccactcgagttgtgtaatctactggattttcgataacttcatcctcgataaagtcacccaaatggctgtcatcctcttcaccgataggtgtttcaagagaaactggctcttgagcaatcttaaggatttcacgaaccttatctggagtcatatccatacgttctgcaatttgttcaggtgttgggtcttgtcccaactcttgcaagaggttacgttgttcacggaccaatttattgatagtttcaaccatgtgaactgggatacggatggtacgtgcttggtctgcgatggcacgtgtgattgcttgacgaatccaccatgtcgcataagttgagaatttgaaacctttagagtagtcaaatttatcaacggctttcataagccccatgttaccttcttgaatcaagtccaagaactgcatgccacgtcccacataacgtttagcgatcgagactaccaaacgaaggttggcctctgccaaacgttgtttagcttccaagtcaccattttcaacagcgatagccaattctttttcctcttcgttactcaagagaggaactaccccaatctctttgaggtacatacgaacagggtcattgaccttagctgagtttgaaccaagaagctcctcgtctgtcaattcttctggttttggggcttcaacaacatatttagatgaaggatttccgtccttatctgtgatagagataccaccgtctgtcaaacgttccaaaaggtcatcaatcccatcagcatcaagaacaaatgggataactagtttctctgtgacttcatcatcaattgctgtaccagcctttttgtggttacggatgaaatcagcgacttgaacgttaaatgctgtattttgttttttctttgccatgtgttactccatatctcgtttttggtcgatgagcatttgcagtgcttctaccgctgcatccacatcaccgtggttacttgattctcttatttgtttactttgcctacggaagtcctgttccctcagaaaatgatttctacgctcttcaatagcctggacttcctctaaactggtttcaggtggcaaaatctcctctaaaacctgataataggctgtttgtacctcttgagaaagtacagacaaggccaccgtatcgatttgaccatcttgcttcagaatatgatagagctcctctaactcaggtgtttggaagaaaaactcctctctcatgcgatagtcattcaaaatcatcggatgatttaacatgcgatggaagagttggttttccgcgcgacgaaggcctgtaatcttaggtgtagaaggtagtttgaccgtccctctgaatcctgacactgaagactcataagtactattactagtagccgataattgagccgtctgctgattcctcatagtcaatcgttcgttattgaccgcttgctcgacttgaaaaaaatcaaaatctggcaaaaggtcagccaccttagaaatgtaggaattttgtgccgtcacagaaggggacttggcaataatcttagcaatctgctcgacataggcaatctctgcttgaagattgtctacattggcaggcttgagctgtccaatccaaaattccacatctgaaatgcgggactcgaccaagagtttccccaaagcctcttcggatgttttctgtagatattcatcagggtccatattgtctggaattttaacaatatcgacttgaaaatccgataaaagctcaagagacttggcgatcgcattttgcccagccttatcaccatcataggtcagaacaattttcttggtgagtttacgcagacgattgacatgctcaggggtcaacgccgtccccatagaagccacagcatttacatgcccagccctataggcagcaatgacatccatgaatccctccatcagatagacttcatgagtcttctgaatcaccggtttagcctgatcgaggtgataaagttcataagacttattgaaaatgtgggtagcccttgtatttttgtacttggcttgtcctttttcaatatcgtccttagtccaaacacgcccagaaaaaccgatagtctttccaaactcattttttagtggaaacataattcgatttttaaaagtgtcgaaaatgcgattattttcagaaagattaaaaagacctgattctgtcagtacctcttcgtcatatttttttgaaactgactggtagagataatctggttcgtcaggggataggccaatctgaaaggccttgagtaactcgtcagtcatcccacgctcatagaggtaggcacgcgctgcttctcctatcttagtcgtcatgagaacagcatgataaaacttaagtgcatcctcatgaagatcataaaaagcttgattaggagaattttgctgcttggcttgtcttggcgcatctatactaactgcgatacctagccgatctgccagaaccttgacactttcttgaaaagaaatctgacgatattcttctaaaaatttgaagacatcgccagacttgccacaaccaaagcaatggtaaaactgtctgtcctcaataacattaaatgagggggttttctccttatggaaggggcagagacccaggtaattgcggccagcacgattaagactgacaacttcaccaatcacgtcgacgatattggtactactcttaatatcttctattaaagctttatcaattaccatctaatcgccccctatcttaccataattgcattacccctaattataacacgatgaaaaatgaaagtaaaataaaattgatttttcatgagcaaatctcttgtcaagatttacaaaaccagataaaatattaaaagtaaataaaagaaaggattcattgtcaaaatgattaaagaacttaaagactttttgttcaagggtaatgtccttgatcttgctgtagccgttgttatgggggctgctttcaacgctatcatcacttcacttgttggtgatatcatcacaccacttatccttaacccagttgttaaggccgctaacgttgaaaacctctctaaattgtcatggaacggtatcgcatacggtagcttcttgagcgcagttatcaacttcatcatcgttggtactactctcttcttcgttgttaaagctgctagcaaagcaactgctcttagcaaaaaagaagctgaggatgctgctgaagcagcaggtccatcacaagaagaattgcttactgaaatccgcgatcttcttgcaaacaaataatctttatttgttcaactaaagacatatgaaacttaagacgtctgaaatctcagacgtcttattttttgtatctcaggactactaactgacttatttattcgatgaaaagaaaaaaacttgagaagactcaagttttttctgttaatttcattcttaattagaattttttacgtttgcgagctgcctctgatttacgtttacgttttacagaaggtttttcgtaatgttcacgtttacgagcctcttgaagagtaccagctttagtcacagaacgtttgaaacgacgaagagcgtcgtcaagtgattcgtttttacgtactactgtttttgacattgaattcacctcctcaagataatgtaacattttacacgttctattcaagtatacaagactcgtctttttctgtcaagaaatatattttaagtttaggaatttttgctattacagttgacttctaagtctactaaaactatccaagttttttcctatacaaaaactagaggaggcatctcccctagctactgatttattcaactgctgtgtatttagaagcatccttgatgtactcgtcgtaagtaccatctgctttcaatttcttgacgactttgttgactacttctttcaatctttcgttgcctttagccatagcgactgcttttgcatcgccatcatcaactttgagggcaacgcttgccaaagccaaatctgaattttgtgccacgtaaccttctgctactggtttttcaaggtcaacagcatcaacttggccagatttcacctcgttaatcgcctcacccattgctgtaagtgatacgactgttgaatctttcaattgtttcttagcaaggccttcttcaatggtacctttttgaactgctactttcttacctttgaaagcatcaagacttgagtaagtagactcttgatctttgcgaacgatgatagcattttgtgtttcgtagtaaggatctgagaaatcaaaggttttcttacgttcggctgttactgagatacctgagatagcaagatcagccttacctgattgaaggctagaaaggacattgtcaaagctcatagttgtcacttcgagtttaactccaagttcatcagcaatagcttgtgccaacttgatgtctgacccgacaacttggtctttaccgtctaccaatgttttgaactcaaatggtgcatagtcagggctaacagctacgacaagttttttattttctttaatagattcgtaagcgtctttttttgacccacatgccaccaaagtaacagcagcaaggagagccatagctccgaggaatagttttttcataagaaactcctgtataaatataatttttgctcgtttattttacttaaaattagtggtattgtcaacatttattaagaaattgcgacagtttttctaagcccttttgaaggacttccttatcacaacaataaccgatgcggacatgggactccttgtcaaaacggttacccggaaccacaagaacaccgtagtcctgaagaagctctaaggcaaaatcttcgataggacgatttacatctaatttgacgaaagaggtggaaacactagcaggcctaacccaagacgccttaggctctttagcaatccaggcatccataagggctagattttcctctacaatctgacggttgcgtttcaagatggcctctttattttccaagacaagggtagccaccatatcatcaaagactccggcacaaatcatcgtgtagtcgcggtagtcacgtagaatgtccgccacctcagtgttagaagctacccaacccacacgaataccgggaatggaataggtctttgaaagactgttgacggcaatgcccttttcatacaaatccacaatagaaggtgcaggttggtcaaaactacgatagacctcatctgagaagatataggcgtctacttctttagcgatagttacaagctcctcaaggtaagcagtatccataagggcaccagtaggattgttggcattgttaatgcagatcatcttggtatttgggcaaatcagacggcgaagttggtccaaatcaggcaaccagttattgtcctcctcaatctcccagaggtccacatctgctcctagtgacttaggaatatcatagagctgctgataggtcggatacatggagatgacatggtcttcaggctcaataagagcgtaaagggctagcatcgtcgctcctgtagctccgttggtttggaggatattatcaactggcatgttcttgtataagctagccacttgagttttgaactctggtgacccttcaatccagccataatccatctttttctttagtagttgagcaaaaaaggcttccttatcaaggcctgataagtcaaataattcttccattgtgagggccttaattgaaactcctgcgatatcatatatggcagacttttcatggacattcagccattcttcaacaccaaaacgtggtagcttcatagtttctccttgcttttcttaagcactctatacgatgtcatttgtctattttgacagacttacctactttgataataactgtttttagcagagaattcaataaaaaatggggtattgccccatttagatttaagaatttttgacgactccccttgagtgagcaaagccaacaccaaacgagactttcctccgttgatgaaaacacctgaaattgactcgtttcaggtgctcagaagttttgagaccttaaacttaaaacttagtcatgaaacttcaaagatgttcgccgacgttcgacatcacctaaggaaagtttctaaaagaacttttattccatgcaaaatagaaaatcttttgagtttacttactttgtttgtagcttgatgcttcttttaaccattggtcaaattttccagactccttggtctctttgatgacggcattaatttctttaagcaaatcgtctgaacccttacgtgtcgcgactgcataagcatctgaaccatctgacttaagattaaagctggcaagggttaaatcatcattttgtgcgatataaccttctgcaatagctttttcaaggacaactgcttgaatctgtcctgacttaagttcgttaatcatctcgccatttgacgcgagtgacaccacacttgacttagagatttgtttcttagcaactgtttcttgaactgaccctttttgcgtaccgacagtttgtttagcgagactatcagtgcttgtgtagtcattgaccttgtcttttttgacaatcactacattttctgatgtatagtagctatctgaaaaatcataaaccttcttacgttcgtctgtcaccgaaatccctgcaatggcgatatcagctttaccactttgcacgttagcaagaacattatcaaaagacatcactgaaaattcaacctttacaccgagtttttcaccgatagctttggccaactcgatatctgctccaaccagcgtatctttaccgttaaccaacgatttgaactcaaaaggcgcaaattcagattctgttgccacgacaattttcttcttttccttaatcgttttgggacttactccctgacttccgctacaagcaactagaaagcaggtagcgactagagctgtaagtataaaccaaaatttcttcatataataaccccttatttagtagaactcttaagagagagagcataggcatcttgaacatagctgtcaatcttaccttcttttttgagtttagcgataaccttattaacctttgcctttagtttatcgcttcccttaggcattgcgacggcataggcatcttttgaatctgacttgagcgtaatgtctgacacagctagatcactattttggtctacataaccttgtgcaatggctttttcaagaactactccttcaacttgaccagatttcaattcattgatagcttcaccaggctgtgccaaggataccacattagcatctgacaaattggctttggcgatactttcttgaatagaacctttttgaacggctacagattttttagcaaaatcaccggcttgtttgtaagttcctgttgcatcttttttgacaacaaggaccgtttcagactcatagtaggtatctgagaaatcaaagattttctgacgttctttagtggctgagattccggaaatagcgatatctgccttaccagattgaacattggctaagacattatcaaaagacatttcagagaatttgacttttacaccaagctcatctgcaatagccttagcaatttcgacatcagctccaacaatcgtatccttaccattttggattgtcttgaattcaaaaggagcaaagtgtggattaagagcaactgtcaaagttcctttatcttgtaccttttccaaagtgtccttcgacgaagaacaagctgctaaagtcgtcaaagcaaagatccctgcaaatcccaacaaaagttttttccatgttttcataatcaatctcttttctatatttattaacttatgtaagtataataatgtattattatgcatttgtcaatgaaaaaatgaacttttattgattgtatttttcatttttattaattttatcgtcattacaaaatctaaaaaaaatgcttatttaaagctcttctatctgattttaacgacaaaaaaactattcattcatttgaataaatagttcatattattaccaaaattctcggataaagtcattttcaagacgctcacgatagaaaagttcagagagttgatcctcttcaaacacgcgcaagaggttgagcatgtcataggccagctccatcttaggaacatcctccctggcaacccaacggacttcgccttcctctgttgaatggatttttccttcaaaatccgaagttctataaaggaatactagataacgctcatcatctgtcgtgtaaaagtgcttcataccgaccaatttaggatttttgatgatcaagccagtttcttccttgacctcacgaataactgattccaccagcccctcgtgggcttcaatgtggccaccaggcagggctgctcccgaccagtaataacgctttggatcgcggatttgcatgacaatatttccacggccatcttcgatgagacacatattagttaaaatagttgtttgtgaacgtgacatatatttcctttcttacttataatgcctaagtgatgtaactagccttaatccatactcttcagctctaaaaccatatcacggatttgagccgccaactcgaagtcaagcagttctgccgcttcgtgcatttgtttttgaagtttcttgatggcttcttggcgttctttcttgttcatagcactgtagtccacagtatcctctgccacttctgcttcattgacctcaatccctaacgttaaggctttactcaaagtttcttcacttcttctgctactttttggagatgcttttcacggatgctagcggtgttcacatcccggccgacttctcccaagatgcagacgcgcttggttttgatcccacagtggttcaagacggcattcttcaaaacagatataccataactatctggaatgttgagagggcctgaaaaaatcttgtaccaccaagtaggcgccatggaggtcgcataaatactggctgttttccctttaagtaactttttgaattgcttgcctctcaggtaattccagataaagcttccctgatcattggctgagtaggcaatacccggtgtaaagacccgatcaatccaacctttcatgagactcggcatactactccaccagataggataaacaaagatgaaatgttctgcccattggattaattcctgagaacgaaggataaaagaatcttccttcatcctctttcggtaaccatagcgaaggacaggatcaaaatcctcttcattgagactgatcactttaagctcgtggcgatttgagtcaatagtttcgacaatggtttgaaaaattgcttgacagtaactttccttatccgggtgcccgttgatgactaaaattttcattcgtcttctccttcatttctttgtttcattctatctcttttatttttttcttgattaattgataatggttcaaagattgatagatacgtcctttaggaatttttatttgaagaacacatcatccgcaattccttaacaggttttccaagtttaagtattttttcttggccatcaaaactaaaacccattttttgatagaaagcaatggctcgcttattatctttcaatacccataaataaatctcagagaaatgattgagaacatcaaatgcagcatgcattaactgttcactcacaccttttccatagtaatcttttaaaacatataatgcaatgatttcaccagcttgaatggcctcatcacgaaaatttccatagctgataaatccaacgaccttctttccatccatcgcaatcaaggtattttctggatacttttgacttaagaaacgacatctatctaatgtcatcgtctcctgaaattcctcgggtaaaagatcgtcataagcctctctccacgtttgccaatgaacgagagattttccttctatctcttcaggagtttccattgttttaatgataatcttcactcttccctcctactaatccaaagccttaacttccaacaccatatcacggatttgagccgccaattcaaagtcaagcagttctgctgcttcgtgcatttgtttttgaagtttcttgatggcttcttggcgttctttcttgttcatggcactgtagtccacagtatcctctgccacttctgcttcattagccttggtaatcgaaataaggtcacgaatttctttcttaatcgtttgtggaacaatgccatgctccttattataggccatctggatttcacgacgacgagctgtttcatccattgctttttgcatagactccgtaatcttatctgcatacatgataacatgcccttcgctatttcgggcagcacgtccaatcgtttggataagcccacgttcattacgaagaaagccttccttatcagcatccaaaatagcaaccagactaacttcaggaacgtcaatcccttcacggagaaggttaatcccaataagaacatcaaagacacccaaacggaggtcacggataatctcagtacgttccaaagtctttatgtcagagtgcatgtatttgaccttgacacccatttccttgagatagtcagtcaagtcttcagccatcttcttagtcaaagtggttacgaagacacgctcacctttttcagttcgtgcattgatttcaccaaggaggtcatccatttgtcccatggttggacgcacttcgacttctggatcaaggagccctgttggacgaatgatttgctcaacgactgtctcggtctgctccatctcgtagtcccctggagtggcagacacatagacaatctgatgaacatgactctcgaattcttcacgtcgaagggggcggttatcaagcgctgatggcaaacggaaaccgtaatcaaccaacatcttcttacgggcctggtctccgttatacattcccttaatctgacccatggtcatgtggctttcatcaatcatgatgaggaaatcttctgggaagaaatcaagcaaggtaaaaggtggctcgccttctttacgtccatccatgtgtcgtgagtagttttcaacaccattggtgtaacccatctcacgaagcatttcaacatcgtattctgtcctttggcggatacgttgagcctcgatgagcttcccctcagcttcaaattgcttaacctgagcttccatctcttccataatattctggatagcttcttccatatgttcttcattgatcataaagtgagtcgctggaaaaagaacaaggtgctcaacttcaccgagattgcgtcctgtcaaactttcaatctcacagatgcggtcaatctcatcaccgaaaaattcgacacgaaaggcatgttcatcacgactggcaggaaaaatttcgaccacatcgccacgcacacggaatttcccacgttggaaatcaatatcgtttcgctcaaactggatatcaactaggtcatttagtaacttatctcgagaaatctcttggcctggtcgaaggctgaccgctgaatcggcatattctttgggcgaacccaaaccgtaaatacaagaaacggaagctacaacgataacatcattacgctcaaggagggccgatgtcgctgagtgtcgtaacttatcaatttcatcatttacagagctatctttttcaatataggtatctgatgacggtacataggcctctggctgatagaaatcatagtaggaaacgaagtattctacagcattgtctgggaagaactccttgaactcaccataaagctggcctgccaaggttttattgtgggcgataaccaaggttggtttattcacacgctggatgacctgactcatggtataggtcttacctgtcccagtcgctccctttaggatttgagccttctcaccaccttcaatattgtccaccaaggcttcgatggcctgaggttggtccccagaaggttcatatttagaaaccaaatggaattggttgtcttcttttctatctatcatggtttttcctttcatttatgtaatcattcatctcttggtcggagaagaattctccttctgcgataggaatgtgaatcatttttgtctcagcaacatattttcgcttttttcgtgtctgaaaaccaagttttttgtcatatttcaaggccattttactatcattgaaaaaaatgtataaaactctatatctctgcctttcccaagaccttatattcccgaaatcatcgatacgttttagaatatagtatatagtcgacgagtgtttggcatcatccattggcgttgaccaatccttcataaccaagtcaatctcagacagcggaatctcaaaggttactcgtccacataaccttccataataaataaaggtatcattgttaatttccaaaatttttttatgacctttaagtctcacaataccgtcaactaaattagtcagagcatgaagaaatattagtaaaatgaagaaggcaacacagttatctacaaagttcccaaaacgataatcatctataagaaaccagcagaatagaccggtggaagcgacaaaaaatataagtccatagacaatttgtacacaaatcatacctcgctcaagtctaactctcatctcttccccttttccaaactttcttctattttaacacagaagtaaaaagaccgagtctttagaactcagccttaaaaattttctttctttaattgtaatcgaagaatgatgatacctaccaccagaaccacacaggtaacgatattcccttctaggccaaaggcaccacctgacaaccaatcaggtacacctgacctggcctgaaagtgcaataagctgccgcctgcattctgtccactaactgacacgccaactagatttccttgcgcgaagttccaagcaccgtgaagggcagcaacaccccagatattatctgtcttgagcatgtaaagagccatgagaacacccactaaaacaatactgatgagagacaaggcggtaactccttgatttcccaagtgtagcattgaaaagagagaacttgaaatagcaattccccaagaaaggttcaatctattagtcaccgtctgaagcaaccaaccacgtgtcaccagttcctcggttccaccttggataaaccagaaaggtattagggaaagtatgtataagagggttttctgcgaaaagtctaccttcacaaattctaaaccgcctagtaaataagtcccaaggaaactaactaacaagagcaaagatccaagtccccaacctttaagcaagttcaaccaaatatgacccttgaaaaatccaagtgtacgaatgggacgtttttcaacaactttaacccagaaaaagatagctaaggcagtaaaggcaaaggctcccaactgaaaatacaaggttgaaaatattttatagtaaatcgaatgtgtatcctggaactgaatgttgccatttaatactaagaacgaaagaacaatagccattggaattcccacaacaatccctgatagaaatccacttataaggaaataaccaaaggcaataaaacaggacagcataatcatcagccaacttgggactttatcatataggctagtatatttctcaagcatatgtttcttcatttttttagctcctgtaacaaatcttacatgtattcgattacagtgtaactaattgacacaagcttgtcaaattcttctaaattacttctcatatctaacgagatttgttagattttctaacatcaaactcctagaagtttgataacaagacctttttttgatagaataggaaggtattttataaaggagaactttttataatgaagaaaaaacttctgacactcttcttgagtgtcatgtcagttttctttgttttcggagcaaaggtatctgccgagactatctcagtcgtttcagacacagcctatgccccatttgaattcaaagattctgatcagacctacaagggtatcgacgttgatatcatcaacgaagttgccaaacgtaaaaattgggacgttaaccaaaccttccctggtttcgatgcagctgtcaatgctgttcaatcaggccaagctgacgcccttatggccggtactactgttaccgacgcacgtaagaaggtctttactttctcagacacttattacgacacctcaattgttatctacacacgtagtagcgataaagtcagcgactacaaacaattgaagggtaaaacagtcggtgttaaaaacggtaccgcttctcaaacttggcttgataaaaatgctagcaaatatggtttcacagttaaaacttttgacactagcgacttgatgaacaacagcttggattctggttctgttgatgcagctatggacgacacaccagttgttaaatacgctatcggtcaaggaaaagactacgctatcaacattaagcctgaatctatcggtagcttcgctttcgctgttaaaaaaggcggaaaacacgaaaatcttatcaaagacttcaacgaagctcttaaggaaatgaagaaagacggcacctacgacaaaatcatgaacaaatggttgggtgactcagaaaaatcttcttcatcaaaaccttcagcagatcttaaattgactggtgatgctaacgcaaaagccactcctgttaaggaaacctacactatctcaatggactcatcttttgctccattcgaataccaaaatggttcaggtaaatatgtaggtatcgatgttgatatcatcaatgccattgctaaaaaccaaggttttaatgtcaaattgactaaccctggtttcgatgcatcacttaatgctgttcaatctagtcaagctgatgccgtattggctggtatgaccatcaccgatgctcgtaaacaaatctttgacttctcagatccttactacacatcaaacattcgtttggctgtagctaaaggaagtaaggttaaatcttacaaggatcttaaaggtaagactgtaggagctaagaatggtacatcatcatactcatggttggaagaccacgctggtgagtatggctttactgttcgtgcttacgatgaagcttctactatgtacgacagcttgaactctggttcaatcgatgctcttatggatgatgaagccgttcttctatacgctatccaacaaggacgtaactttacaacaccaattgaaggtattgctactggtgaagtcggatttgctgtaaaaaaaggcactaaccctgagttgattgagatgttcaacaatggtttggctgctatcgttaaagatggtacttacgataagattatcaataaatacctcgataacaacaaatcaaaagaaggaagttcaaaaaaagctaccgatgaaacaaccatcgtaggattgattaaaaacaactacaaacaacttctccaaggtcttggaattacccttggattgacccttctttcatttgctattgccatgattatcggtgttatcttcggtatgatggcagttgcaccaaacaagacacttcgtgtgatttcacaagtctttgttgacgttgtccgtggtatcccattgatgatcgttgcagccttcatctattggggtatccctaacttgattgaaaacatcactggtcaccagtcaccaatcaatgattttgtggcagcgacaattgccctttcacttaacggtggtgcttacattgccgaaattgtgcgtggtggtattgaagctgtccctattggtcagatggaagccagccgaagcttgggtgttccttacaatacaacaatgcgtaaggtcatcttgccacaggcggttcgcttgatgttgccaaacttcatcaaccaatttgttatctcattgaaagatacgactatcgtatcagctatcggtttggttgaactcttccaaactggtaaaatcatcattgctcgtaactaccaatcattccgtatgtatgcgattttggccctcctttacttggttatcatcacatgcttaacgaaattggctaaacgactagaaaagagacttaaataatggctgaattgaaaatcgatgtgcaggacttgcacaaatcatacggcgacaatgaggtccttaaaggcattgacgccaaattctacgaaggtgacgttgtatgtatcatcggtccttcaggttcaggtaaatcaaccttccttcgtacgcttaacctacttgagacagtgacatctggtaaagtagtcgttgatggctatgaattatcagatcctaagacagaccttgacaaagcccgtgaaaatatcgggatggtcttccaacatttcaacctcttcccacacatgacagtccttgaaaacgtaacatttgcacctgttgaacttggacgtatgaacaaggaagaagctgataaattagctatggatcttcttgatcgtgttggacttgctgacaaagccgatgctacacctgatagcttgtcaggtggacaaaaacaacgtgtggcaattgcgcgtggtttggcaatgaatcctgatatcatgctctttgacgaaccgacttctgcccttgaccctgaaatggtcggagacgttcttaacgttatgaaagaattggcagagcaaggtatgaccatgattatcgttactcacgaaatgggatttgctcgtcaagttgccaaccgagtaatctttactgcggacggtgagttcctcgaagatggtactccagatcaaatctttgataacccacaacacccacgtttgaaagaattcttggacaaggttctaaacgcctaattatcaaaacagttactcttgctagagtagctgtttttgattaccattttggataagaaaaacagagcaagtgctagacttgctctgtttcttcatttagttcagggtgttttgctgcttcttcccttgccaagcgctcacgctcaagacggagttttcggttaggatttaagcgcgtaaagagttcttcaagtttctttggattccaaacatcggccgcagaaacaaaatttccatctttatccctgaaggatatcggtttatctcccattgtaaacctcttatttcaataattttaaattcgccaacttcacgtagttagtaaggttgcttggcagaccgccatagcaattggcctagactatcaagtgcttcagcacttagagagtcttgctcggttacgacacgaaggaaagtcggtcgagtataccgactttacgtagttagtgaggttgataggcagtccgctatagcggctgtcgtagactatcaagtgcttcagcacctagagagtcttgctcggttacgacacgaaggaaagtcggtcgagtataccgactttacgtagttagtgaggttgataggcagtccgctatagcggctgtcgtagactatcaagtgcttcagcacttagagagtcttactcggttacgacacgaaggaaagtcggtcgagtataccaacttcacgtagttaatgaggttgcttggtagacccccatagcgactgccgtagactatcttgtgcttcagcacttagagagtcttgctcggttacgacacgaaggaaagtcggtcgattataccgactttacgtagttagtgaggttgataggcagtccgccatagcggctgccgtagactatcttgtgcttcagcacttagaaagtctttcaacgtcaatccacaaactcaaactcgaagttaccgatacgaacgatatcgccatccttagcaccacgttcacgaagcgcttcatcaactcccataccacgcaattgacgtgcaaatttcatgatagattcgtcacgttccatgttagtcatgacaaagagtttttcaagtttctcaccagaaagtacccatgaggcatcgtcgtcacggctaatttcaaatggacgttcatcctcgttaaagccgtagtacacttcttcttgttccatatcgtcttcgctataaagcaagaattcatcagtctcatcaagcaactctgcagtagcttccaaaagattttccaaaccttggtgagccaaacttgaaattgggaaaatttgtggcaactcatcaaattcatcatagttagcagccaatttttccttaaactctttcaagttttcctcagccccaggcatgtccatcttattagccacaataatttgtggacgttccatcaagcgaaggttgtaagtttccaactctttattaatttgaagatagtcctcgtaaggatcacgcccttcactcgctgacatatcaatcacatgaaggataacacgggtacgctcaatgtggcgaaggaactgtgttcccaaaccaacaccctgactagccccctcaatcaatcctggaaggtcagccatggcaaagctctcacctgacttcgtacgaaccatccccaagttaggaacgattgtcgtaaagtgataggcaccaatctttggttttgctgctgttaccacactgaggatcgttgatttaccaacggatgggaaaccaaccaaaccaacatccgccaaaatcttcaattccaattgaagttcacgttcttcacctggttcaccattttcagcgatttcgggagcagggttacgaggtgtcgcaaaacggatatttcctcgtccaccacgtccaccgtgagcaacgacaaactcttggccatcctcaaccatatcagtaataaccttgcctgtctcagcgtcacgcaccgttgtaccaggcgggatgctaacgatgaggtcttcagcacctcgtccgtgcattcccttggtcatccctttttcgccattcttagccttgaatttacgattataacggaaatccataagggtacgcaaaccttcgtcaactttgaaaatgactgagccacccttaccaccgtcaccgccccaaggaccgccattgggtacatatttctcacgacggaaggcaaccattccgtctccaccacgaccagctttgacactaatcttggctgtatctaaaaacatactcatctatatttctctctttctgatttgtatgccatgtacaaattcaatcacaaacgaaagaatttccgacatacacaaaaaaacgcttgatagcgtcttaaaggacagctgcgactgcttggaaaatcaatgccccaactgttactaatagcataatcaaaacgaccaatactgttagacgttcaaaaaatgatttcttacgtggtccgttatctccaaatgccacttgaatttacctcgttttttcttctaatatttcacaataatagtaacaaaaatctgcctatttcgcaactcttagactagcttaagccaaaggaattccaaaaaccgttaaagcttccaactcctcctcggtcaaacgtcgccaagcaccgacttctaaatcattgggcaggcttaaaggccccatacttagacgttgtaactctgtcacttccttaccacaagctgctaccatacgcttaacctgatgaaatttcccttcagcaatgctaatctgaaccaaactagtcccaacagccctatctactgatacaatctctagcttagctggttggcaagtgtggtctttgaattcaattcctttttcaaaagccaggatatcctcctgatccataataccatccaccttagcctgatagatcttgtccacatgtttcttgggtgacagcatagcgtgagctaaatcaccattattggtcaaaagcaggagaccgtgagtatcaatatccaaacgtccaacaggaaagacctgcttatgtctagctgtatcatccagtaaatcaagcactgtcttgtgacgagcatcctccgtcgctgaaatgacaccctgaggcttatttaaaagatagtaaacaaaggtctcgtgtgttaatgcttgaccttgaaaagcaatctggtcttgattctcatcaatctgagtcttgggcgacgtctccacctgaccatttacggtcacttgcttctttttgagaaaggtcttgacttgactgcgactaccaacaccacaatcaaccaaaaacttatccagacgcatctatacttcctcctttattggaatccaaacttccatttcataatcttcagcctgacgattccctggtggataaacctctacagttggctgatcaatcatttcaaaatgtttcttagcataatgaaaactctcccaaacagctgctgttgcaggccctctaagtttaaaaaccgcataagtagccggtgcaagagcaatcatttccatactatcatcctcaccagccaaggctgttacataagtcttacgactgccatcattgatccgaataccataggtaggaacagccaaatcatcttgttctgccaaaaagggtacccaaagaaagtctgttggcttacctagttcctcgccctcaaaagccatccctgaaaaactcaaaaatccctttcgaacaaccttcacatcataacgaacagttactaaatccagcttttgaatcacctttttcagttttgtcagttcaactggaacctcatctgctaggacataggaaatcttttctacaaatgcttctttttcagcattaccagaacctataggaaccaagacccaatcttctgctgtaacactttgatcttcacaaaggtaagtaaagtgctttcctccttcgttaaaagacacatcggctaaacgaaaaaggggctcaggcaaatcgacaaccaccatctcaagcccctttgcttgaaacaagagctcttggtcccttaatcgcaccttcatagccaagctatcactatcaatagaaaagctgttatccaagtccattacagactgaaagaaggcctggtgtaaccctgaaaaagtccagacagcatgccaacgacacatcatctcataatcatcaatggtcacaagaagagagagctcctgctggtctgacgcataagaataggcttgaacgctcaattggtctggtgtcaggtagtcattaacaaagacagcaaagtcatccatggtttgaaaatctgacataaacgctccttttctattcctcgaccgagcctgtcacatacatggtaaatgtagcccttgtaaggattttctcttcctgattagtaatgacaacttccaccaccttagtcgtcttgccattatgaacacacagaccttcaattttgagttgatcagacaaatgccctgccttgagataattgatattagactgaagcgtcactgcatagtcacctgttgaaatggccacgagccctgcgacctgatcacaaagtgtaaacaaataacccccatgagcattaccaaaataattcagggacttctcgactaccttagttgtcacgatgacatgtcccgtttcaaatagttcttcttgaaaattctcaaacacacggatttcatgtagtttgtcttgcatagcaagccctcctattgctgctcattccacacctagtgaaatgacacgtctttatctactagtataacacgaagttcataaaggatagtaagcttatttggctaagctaatatcaacctgaatatcttcacgaaaaagcttcttcactcggcaaaaattatccacaaaagccaagagttcttgctcattttccaaaatcagatcctcaggtaaatgaatggccagagtgaaatggtcttcttcatagttggaatcaacttgaatagtaagctcctcgattccctgatacttggcaaaatagctctgtagacacatagtcacgcaggaagccaaggcaatattgaccaagctcatcggtgtttccccatcttccgtatagccaaaaagttccacaggtgctccgtaaccctctgaaagcgaatggaaacgtttgtcacctttaattgttgtttgatacatcatgtcacctcaatctttttttattattataacaaagagagccttaaggaccgaactgaacgctttggaatatctatcaaaagaagaaaaagcgtaaggtcttttagctcttattttccaatagattagccttgtacaacactgatattaccaagggattacagttgcgtaaaaacaactggaagcgcttttaaatctttcttttttcatttaaaataaatttactcagaaaaaagggagactattatgaaaacattttctaaattaactttagcctctgtctcagttcttgccttgttgaccttagcagcatgtggcaactctaaagacaaaactgactcatcatcttcaacaccatcatcaagcaaggtgaccaaagaatcttcttcaacggattcaagcgcttcagtaaaagtcaacaaagacggatcaactgaggtcagtgacggaaacggtaactcagcaaaaacaaacggtaataatactgtcgaagccaacgatagcgaaggtaacagcgcaacagttggtcaagatggctcagtcgacgttaatagccaagacggtacaaatgtcaaagttggatcagacgggactgtctcaattggtaactaaataagataaaaaaggctagctaatctgctagtctattttttaggttcagattgatgtaaacgcttcctgaaagtgctataataggcgtggaaatccaaattcaggaggtgagacaatgaaaaataaaatcgtcttgggatgttttgctgcagcgacttgtgagattctctttgggctcagttttatctttaccaaatctattacagcacaggtcagtgacctggctttgatctcttggcgctttgtcacagccttcctttttatcaacctctattttctcgtcagtcgacgtcggataaacattaacggtagaaatcttaaacctctgacacgtattgccatccttaatccgataatctattttatctgtgaaacgattggcattcgtatgacgacggcttctgaaagtggtgcctttcttgcctgcatcccagtcgttgcccttatcatgtctagccttattttaaaagaatggcctagccgttggcaggtggtcggtgtcatcacaaccctcatcggtattatcatagctgtctttgctgctggcggttctacccacttctcccttgtgggctatttgattctaggtctagcagtcgtctcctacgccctctattgcgttgatgtcgaaagagccagtcaatttagtagccttgagattacctattttatgcttgccagtggttgcctgacatttggactctttgcactaagccatggctttctagcaggtgatttgaaagagcttttgcttctccctgtgagcaatccaaaattcactatcactatcctttatcaaggcttgggatgcagtgttctgggctatctgctttcaaattttgccatcgcaaatatcggggtcaaccgaacagcatcctttattgggatttcgaccattatctcaattctagctgctgttgtcgtcttaggagaacccttctcgcagctacaaatttttgcaggcattttagtcgtcctaggcgtctatgtagccaataaaacctaaaactctcgggaattaatcttccgagagttttttagtcttaatcaagctctgtttgaatcaacacgacgagttcttcctcattaggaatactgctaaccgcagtcggctcaggtaaaggcttatctccatagcccttaataatatgtgctaaaaacacagatgctttcgtcatggcgactggcaaagaatctgccctaatactacgaccaaagtcaggaaaattgatttgataaccttcctcaattgtgtgaaaaattgccggatattcgtataacatgtctcttcccccatttcaatactagactcctctatgataggatgagttgcaaaagaagtcaaccgaaaatcgttttatcaggaagtgaaaccattcgaaacaaggcagctctaaaactagagattatcaaggaatcgatgcgttcatgttttgaaaccattcgaaacaacacagctctaaaactctttgtaattgcccttaaacctgctataaattttggaaccattcgaaacaacacagctctaaaacaatccacgcattgaatttgaaatcaaggaggttttggaaccattcgaaacaacacagctctaaaacgtatcacctgcattagccgacttaacgacgttttggaaccattcgaaacaacacagctctaaaacttgcgacgaatcgtgcaagtatgaaaggaagttttggaaccattcgaaacaacacagctctaaaactaccatggaagtgctctaccgactgagctagttttggaaccattcgaaacaacatagctctaaaaccagtgacatacactcgttgaccttgctgatgttttggaaccattcgaaacaacatagctctaaaacggctgatagcgtgtgccaaactcttggaaagttttggaaccattcgaaacaacatagctctaaaacggctgatagcgtgtgccaaactcttggaaagttttggaaccattcgaaacaacatagctctaaaaccttcaatttggttgatagaggtcatgagtcgttttggaaccattcgaaacaacatagctctaaaacacatacttaatagcaccgtcgataacgaagttttggaaccattcgaaacaacatagctctaaaacgccatgtcttcgtcttcaaccttgccgccagttttggaaccattcgaaacaacatagctctaaaaccagtgacatacactcgttgaccttgctgatgttttggaaccattcgaaacaacatagctctaaaacctttcctatcgcatcccttgacttgcatgagttttggaaccattcgaaacaacatagctctaaaaccttgtaggtcaattttttctaccagatttcgtaatcgcactattcatctcagcatgacttcagcttcaaaatgattccatttttatgtttattataccttaaaaagccttatataacaacgttttaacaaatagagttgtcgctatatcgaaaaaattttagaaatcttattccaatcaacttaccttctcacctatcagatagcttataatctactctctaacaaaatgattcttccactcaacttcatgtagaaactactaaatactaaaagatagtcttgaaataactcaagactatctatacttattaccaaattactagttattgtaaggcatcaaaatgtaatccttatccaaaataaattgttgaatacctttaatctttctaggttccaaaaataatacatcagcttgtaataactttgtatattccaagatttgataaatttgatcattagaaaaatacgacaaactattgacgaacaccaaaattctctttttaactaaatatttgaaaatctgtaaaatctcaaatattttttcaaaaaccgtacaagacgtagtttcgattctgatacctaacgatttaattagttctaaaagcataatctcatcatactctatatctagttcattttctaaacactctgccatgataatatcagtaattaatgataccaaagaatctatttctgatctaacttctggtttatcattcaactggcttacaatatctgtgtgaagcaactttaatacctgagaagtattaatatcgtaacctaaaatatctgttattaaaagcaattcagaggactttatactccttattttactatcaaatattgttaaattcgattgttcatcatactgatagaattccttaactatttgagcaaacacactcacatcctcaattacgagaactgtcccctggctaatctccataggctcatccaaaagcgaaaaattaatcttcatcacaataatcttctcctaagaacactaacctttcgtctgaattggcaacactggtgttcttatctccgtacaaataaatcatacgagcaaattgcttttcagtaactgttaatattgttatatttccttttttaggattattagccttaagtcgtccaatcattgctgtatttgcggtaatgtgtgtttacgactacagttctccaacccgccattccattaatcctctcctagtttgccaaggtcgattcgtgtttcgtagagacctgtaacagattggtgaataagtgtggcgtttagaatttcagcaacagatgaatatcgttttctttcaatattatgtccaaagaatttaaaagtggctggtgccccaatcgaagtaaatgtcaacaaattgataaaggaaataaccaactcatcaatctcagcatccatatttgtatgatagatttctcttatctttttcaaatttgtttctgccaaaatatatttttcagaaaaaactgatacaacatcaaggattttcccaaaatctgcccgatgagtttctacatattctagatgttctggttctagagtattatggatattttttgcatgataaagaagtttaaccaatttgttaggcagaataaactcattacccttttgtagctctttagcacttgctaataatctacgtcttccattctctaattcaaataaactgaacttaggtaacggtatgatgttttcatcttggatatttcggaatcctcttctttcaagaaaatctattgtgttattttcgaaagactctttttccataatagttataccaactaactccttaactggttttaacttcttagactttcctttctctctttctgccataaccaatacagaataagcaacaataggactatcaaatccaccatatttttttgtatcccaaatcattttcttcgtttttctaggaatcaacttgtcagaattaccatgtggctgtaccgactctttagaaaatcctcctgactgtacttcaactttcttcacaacatttacttgcggataagaaagtactctccttacagttgctaaatcagactctttattccaaacggattcgccggtctcctcatttacctcaataagtggtctttcaataactgtaccatcagctaaagaaatagattttttaaagatattcataatatttgaatagaaatataccttttctgtagctgactttctttctctaaaactattgtattttgggtagtcaccatacacaaattctggctctagtttagggtatttcttcagtaaagcacttgccacaacagcattcaaataggcatcatgagcatgatgaaaatcgttgatttcacggactttataaagttcaaaatccttacgaaattgagaaactaagctagatttcaaggtaatgatttttactgttcgtaacgttttattatcttcatcttttttattattaaatctctcatcaagtaaatgagctacatgttttgttatttgacgtgtttcaaccaactggcgttgaataaaaccagctttagcctcaggtgacaaacctccccgttcagcttttgtcagattatcatattttcgttgagaaattaattttgacttcaataattgataccaaagtgtctttctttttttgacaacctctaaacttggaacatcatctgatttaccacggttactagcagatgaaacaagtactttattgtcaatagaattatctttcaaaaaagcttgaggaataatatgatcaatatcataattacttaatctatcaatatctaattcttctccagtatacatatcttttccgttttgaagataatacaaataaagtcgatcattttgaagtgcgttattgtctattttagaaagttttgcaggaatattttccttaagtatcttactacctaagtctttgagagattcttctaaacgtttcaagcgttgttgagaattagatttaccttggttggtatattggttttcacgagccatctcaacaacaattgactcaggttctcttcccattactttaaccaattcatctacaatttttatgctttgtaaaataccttttttaatcgcaggacttcctggcaaagcctgaacgacctgtttaatattatctttgtcaccaataatttgtgccttctttatcttctttttaaaagaaagagcatcatcgtgaataagttgcatgaaattacggttagaaacaccatcatcaattaagtaatcaagaatagtattaccagatttttcatcacgaataccattaataagcttagcagataacttaccccagccagtgtaatgtctacgagataactttttcaaaacggatttatcgaatatattctcaaattttgaaagacgttgttttatcatctctctatcttcaaaaattgtcaaagtatggataatttcttcgataatcgattcgtttgaactatcatccaaaaactctttatcattaataatatttaaaagatcgtgataagtagataaactagaattaaactgtttctctatgccttttaattcaattccatcatatccatcaattgcatgtaaatattcaataatatccttatcagtaactttccttttatttttaaaataaagtcggacaatatctttcttctgcttactatctaaaaattgataatctctcatactttcggcaataaatctaacttttgttaattcattatatacagtaaaagtttcgtataagagactatgctttggaagtaccttctcttctggcaaatacaaatcaaaactagtcattcgattaataaaagcctctgccgaagattctttgtcaataacgtcctcaaaattccaaggtgtaattttttcatttcgttttcttattgaccaagcgaagtcactattccctctcgcaagtggacctacataataaggaattcggaaggttaaaatcttctcgattctttctttatttttagccaagaaaggataaaatttagcttgcttatcaagaattgctctcatttcttgaagatgaatctgatatggtatcgaaccattatcaaatgtgcgttgctttcttaaaaagtcttctcgatcaattttttcaagaaaatagtccgaaccttcaagaccagccaatagtttttttagatgtacatagaaatcttcctgacttgtttttccatcaatataaccagcataaccgtttttggtgtcgtctttaaatacttcattatatgtttctagggaaatatttcttatgtatgcctttagtaacgctaaatcttcttcgtgttccttatatcgcattatcatagcagaagaaagaggtgcttctgtcccattatcagttacagtcagaatacctgataaaagaatagcatcataaagtttctttgctttgaaaaagacatcactataataatctccaatataacctagcaaagtctctaaatcttcatcatagctttctttagaaaaatgtaagggggctttttcgtctaaattaaaatatttcttaaagtcagcttgatttcctacaatcaactttagaaactctgaaaaaatacccgaatttttctccccaggaaagagttttaaaatacgatctttctttgctgatttactaatcttatctttaacaatttcctcaagttgtttactattctcaagtgataaatccgattcaaaaatagcattataagtgtccaaaaagtcttgaaaattcttctgaatatcattattttttgaattaaagtctccttcaattaagaagtgacctctatatttaatcatatgagccaatgcaagataaactagacgcaaatctgcttttttagaactatctgctaaatatttccttaaatgataaatagttgggaattcctcatggtaggatttttctcttactaggtttccaaaaatcggatacttactgtcacgcttgtcatcaggaactaaaaatgaatcgtctagtctttgaaagaaagattcatctatcttagtcatttctgtgctaaaaatttcctgtaaatatagaatacgattacgacgtctagtataacggcgtcttgcagtacgctttaatcttcttccttctgctgtgattccggattcaaagagcaacgctcccaacaggttctttttaacatattttttacttgtatttcctaagactttcatttttttagacggaaccttgtaactatcagttattacagcccatccaacactattcgttccaatatcaagtccaattgagtatggcttagtcatacatttctccttatttgaaaaatctaaatttatagaaaatattatacacttattaaagaacatttcaacacctgatagaactacttatttaatagtacagagttaaagtcttatgattaggaaaataattttttattaccttactctctagtatattgacatattggttacaaagctatataatgaaagtggtttgaaaccattcgaaacaatacagcgagttaaaataaggcttagtccgtattcaacttgagaaagtggcaccgattcggtgcttttttggtacacaaagagtcccttggaatcatccaaaggactcttttttatttctactatttattaacctcatccaaaatatcaattaccttatacaaatctggttctgtgatttgataaggtgcttgttcacggacaattggtttggcacaaaaggcgataccaatgccagctgtcttaatcataggtaaatcattggcaccatcacccattgcaatggtttgtgagagttcgagaccattttctaccgcccaatccttgagtttggctaccttgacatctttggtgacaatctcaccataaaccttaccagttaagacaccatcaaccacctctaggtgattagccttgacataatcgattcctgcttcagctgctagtctatccacagtctcatggaaacctccagaaaccaagcctaccttaaagccacgggcgtgaagttcatccaccagttccttggctcccttgttgaaatgaatacgagcatagaccttatcaaatatactctctggcaatcccttgagggtcgctacacgctcattcaaggcctgtctaaaatccaattctccacgcatggcacgctctgtgatttcagcaacttcttgaccaacgcctgcttcttctcccaataaatcgataacttcttcttggactagcgttgaatctacgtccataactaataaacctttaacttctgacataattacctcgattctttgatgcctatctaaacctacactggatttaattttaatatgaaatgaaaaacggaccttacaaaaaattctggaccctagtccagaatctttctcttacatacgaatttgttcgcgtgtcttctcgtaagatgatacaaaacgatctgtcacacctggttcaactgtttccaaggcgtaagagatttcttccaaagatgcatcataatcatggtcaacttcaaacaatttaagcgcatgctcaaagctgctttggacagcaggttcgaatgaacggtagcggtttgagtattgcaagagttgctcagtcaaggttgcattttgaacaaccaaataggcagtctcttccaaatggtcaatggcatttttagatgtttctgtcaaacgcattaccgcatcaatattaatacgtccacggctgagttcatccataagagcctcaatttgagcacttgttgagaagaagacactcaagaaggattgtggaatacctggaagattacgtttttccatgtaacgcttgataacatgcaatttattaacataaatatcaagttcttcacgtgccttagcttcgtttttctcaatagcctgaagtttttcaaagacctcaacctgaccattttcaacagcagacaaggtattgagactcttttcaaagatcttttcaagttctgagaaaggtttcacctgagtttcaaagttttcaagggttggaagcacagctgtctccacacctgaaatatcagatgcgaagctacgaacatctgctgcataggtttcatcgaaaatgtaagtcaacatgagacgctcaagctcttcttgaagtttcttgttgttttctttagcatgcttgagataatctggcaaaattttcttttgacgcataacaaccttgtatgatgcaatttcacgttcgaaaatgctatacaagttgtcaatcttttcttgaatctcagcgttttcttcttccgcacggtccaaatcaagagaaaccaactcacttgagtttgaacggatagcttcacgaatttcttggaagcgacgttcaatatttttctcagggaagtggtaattttgctcaatcaacttgcggtagccagactccaaatcatccaactgatctgggaaatcatcttccaacttagctacaatagcaggaatcttctctgaaatttgccccaatgcgatggtgtgctcttctgcacgatccaagatgcttgaggcctcaacagggtcacctgatgagttaagagtcacgaattctgcaaattcagcttcaatgtttttaagctgtttattgatttcggtcatggtagaaccgaaattatcagagttttcctcgattgagttttgcaactcttcgtacaagtctagtgcatgcttaacacgagcactgttcttttcttcttgttctttcaaggttgagagcgcctcgcggatagacttgatgtcttcttccacaagatccaactgactctcaatattattgatttcaccactagccttgaagaaatggaaggtatcgttcatattttcagcttcaaaaatatgattttcaatatctgcgaatgaatttgttgagatatctatccatttctggttccattcacggaaggttgtttgactttgtccaatcaagtgaagctttttgacttcttcaatctcttcattaactggcaagtcaaacaatttttgcttgcgttcttcaagctctgcaatccgcgaatcatttcgttttctgataagaataccgactaagtaagcgataattacgagcataactaccactacaatcagtaaaacaattccgctagacatagtttctccttaatcgtctattatgttcataaatgtagaataacattacgattatatcatagttattctagcattgcacccttttctaaaagaatattagatatctagagtactgtaaacggcattttcttcgataaattcgcggcgaggttcaaccttgtctcccatcaacatatcgaaaatcttatctgcttctgcagcatcatccacagaaacacgtgccatcaaacgattttcagggtccatggttgtttcccaaagttggtggtcatccatttcacccaaacctttataacgttgtaccgtaggttttgaacgtcccacactatacttttcaagagcagcacgcaatttttcttcctgatctgcaccaggttggatgtattccttaatttcagagccaaccttaaccccataaattggtggctgtgcaatatagacatagcctgcttccaaaacaggacgcataaagcgataaatcaaagtcagaagcaaggtacgaatgtgagccccatcgacatcggcatcggtcatgattaccaacttgtggtaacgtgccttactgacatcaaattcagctccaaaacctgttcccatagctgtgaagagagaacgaatttcttcattggctagaatcttatccatgctagccttttcaacgttcaaaatcttacctcgaattggcagaatagcttggaattcacggttacgccctgacttagcagaaccaccggctgagtccccttcgacaatgaacagctcgttcatttcggcattattcgatgaacagtctgccaacttccctggaaggttagaaatttcaagacctgacttcttacgtgtcacttcacgggcacgcttagcagcgatacgggccttagaagccaaaatccctttttcaacaatcttcttagcgatggcaggattttccaagaggaagcgactcaaagcttcactgaagagacgattggtaatcttaactacttcagagtttccaagcttggtcttggtttgaccttcaaactgtgggtttggatgcttgacagagatgatagcagtcaacccttcacgaacatcatccccagtcaaattatcatctttttctttgagaatcttattctgacgtgcatagtcattaataacacgcgttaaggctgtacggaaaccttgttcgtgggtaccaccttcatgggtgtgaatgttgttagcaaaactcatcaccgtttcatgatagccagtcgtgtattgcatagcaacttcaactgaaataccatccatctcaccatcagtgtagataggttcatcaaagataacatccttgttttcattgatgtatttcacataagacgtgataccaccttcgtagtgataatgcttctcttgctcgagaccctcacgcttatctgtgatagagatacggagccccttgttcaaaaaggctagctcttggatacgtttagccaattttccaaagtcaaactcggttgtttcttggaaaatctctgggtctggcgtaaagtgaacagtcgtaccatgtttctctgtttcaccaattactgctagatctgctaccactaccccacgtttatactcttggaagtggatatggccatttttataaaccttaacatcaagttgtgttgagagggcattaacgaccgaagaaccaacaccgtgcaaaccaccagagaccttataaccgcctccaccgaatttaccaccagcgtgaagtactgtaaagacagtttcaactgcaggacggccagttttttcttggatatcgactggaataccacgaccatcatcgacaaccgtgatagaattatccggctcgataaagacctgaatatgagtggcgaaaccagccaaggcctcatcgattgagttatcgacaatctcccataccaaatgatgcaacccttcttttgaggttgatccaatatacatacctgggcgcatacgtaccgcttcaagcccctctaagacctgaatctggctggcatcatattcttgcgctttttcttcaagattttttaattcatcagtcatctatgtcacaatctccaataatgatttgtggccatcaacaagcaaggtatccagacccgctgctcgaccagcctctatatctatctggcggtcacctatgaccaagccatgtttaatatcgtatttgttaattaaataaagaaaactatctggactaggctttctagcaaaaccattttcagaagttacaacctccgtaaaataaggggcaatctctgccttatcaaggatgtctagcaccaagtgattacggtggctaaccaaaaaattacgcccaccctcagccacaatcttagctaggacagccttagcaccttcaaaaagaacaggttcctgtaaatgcttggcttcctcttgcttatatagggttcgaaaatcagctatatcaggcgcaaacatagaaatggcagtgctggttgataccttgagggcatcataaatttcttggtgctctgccgtccgaccaaattgctctaaagttgctagaaaggcttgggttgatacctggtaattatccaacaaggtaccacccaaatcccagatataatctccataattcataaccttaattataccataaaaggtcagattttgcttgtttttcacagctaaaaaggcttggataagctatccaaaccttaattttttattttagaatcaaacttgccacaatgggactaataaagacatatagaatccctgtcaccgcgattgatagaccacccatggcacctgcaacctgaccatatctgaaggcagctccggtacctacggcgtgtccagttcctcctagtgaaagtccgatagcaactggatctttaatgccaatcatttttaaaaagacaggacccaagacagaagttaggatacccgtaataacaacgacaactaaagtcactgtcgtaatcccctgcattttttccgaaatccctacagccatggcagtcgttacagacttaggaaagagagagatggctaggaaataatccataccaaaaagcttagcaatcaaggccgtataactcgtatttagaacacaggcaacagttgatccaattagaatactcttatagtgatggcgcatgaggtgtagattcttataaaaaggaactgctagcgcgactgttgaaggaataatcaaactgttaaggtaagaaccacctacatagtaatccttataggaaatacctgtatagtgcaaaatgacgataatcaaggcagtcgatacaagaagaggcgttgtcaaaggattaggaaaacggcgataaatcaaaagccctattgtgtaagctagtacagaaagtgttagcccaaacaagggtgtattaaaaaaattagccacgtttaacctcctcgtaatcaccttcaaaatgttttttgatgaaaccgacaactactgcaatcactacaatattaagaaccaaggctcccataataatcaaaataatagggacaatattcgctgaaatagcattccatcgttccataataccgacacctgctggcaaaaatagaatggtcatattggtaattaaaaactctgctactgcatgaatatgacgtagacgaatccacttaagctgaagagcaataagaagcaagaataaaccaataatgcttccaggaataggtaatttgaagaatgttgaaatagcttcaccaataacggcaaacaaacaaatcaacatgaattgaacgtagtatttcacgacttgcctcctaggtttaatcacctattagtctactcctttttttttgaatttcaagagttttcagtaaattcttttgaaaaattgagaggtataaatcagcctctttgaacataaaaaaatccaaccctaaggctggactttatcacagatgccaccaccgagaattgaactcggaacggagcattaccattgctctattataccatttaactatagcggcaactgttttaatcttaccatacttctatttactgtggcaagattttttgcttattttttataaatttaagtcttggtaaggggtacggtaaccaacctgtaaaaccttaccatctttaatcaagataggacgtttaatcaacataccatctgaagccaagagttcaacagcttcatcaagagatagggttggcaacttatcctttagacctagagagcggtaggattgaccactcgtattgaagaatttcttaagttctaaatctgaccctaccaaaagctcttttaaaaattgagctgaaggtggattttccttaatattaatagattcaacatctaaacctaattgattgagttctgcctttgccttgcgacaagtgctacatttgggatattcataaaaagtgtacatgtttttctccttttttctagcataagatatctgtctaaggattgtcaaacctaatgccttctaaatgaagtaagaaatgcttggcatcttctcctgcggcgtattttcctatatgaccactactaggaagaacacgatgacaagggaccagaatcaaccagggattcttaccaacagcagttcctacggcctgtgccgattggcatgaaatcactttaccaatctggctataggttctactctgacccacaggaatgtcccgtaaagctgaccaaactttttgctggaaggctgtccctctatcagctagagggaggttatctgaacttggatgattacctttaaaataagcctctaaccaattcttggtcattttcaagataggatttgaggtgtctactagctcctcttccttaattcctgcttgaaaatgcttttgcccctccaaccaaacaccataaagcgcttggtcacttgccaccaagcacaagcgtccaataggagataaataatactgacgataaagcatgtctttattataacaaaaaagacaggaatctcttgttcctgtcaattaactcttattatttacctttaatcaaacgcacacgaacgatattctcactagcttcaaacttagcaaccaattcatcaatcttagacttatctgtttcatcaaggtcaagaagtgtataggcatagtcgcccttagaacggttgatgatattatcgatattgatattaaaatcagaaaccgcagtagagatacgagccacaatattaggcacgtttttattaatcaaggtgatacggtatggggcactcaaggcctgttgcacacgtgggaagttaacagagttaacaatttcacctgtttccatgaaacgacgaatggtttgaccagccataatcgcacagttaagttctgcttcacctgttgatccaccaacgtgtgggaagacagtcacattaggtttgttaaggaggtcttctgtaccaaagtcggtgatatagcgtttaaccacacctgtttccaaagcatcaaagagggcatcgttatctaccaactctgcacgggcaaagttaatgatagttgtccctttttgcatgaggttaaaggcatccgcattgaaagtaccttttgtatctggtgtcaatggaacgtgaacggtgatataatcacagttttcaaaaatctctttaagatcagaaacacgtcttacatgatgagagatattccaggcagcttcaatagaaacatatggatcgtaaccatagaccttcattcccaaacggtaagcatcattggcaatacgtgcaccaatagcaccgagcccgataacacccaatgtcttaccagcaatctcgctaccagcaaactgtttcttacctgcttcaatttgtttaggaacatcatcaccactaagtgtgttaacccaagcattggccgcaatatagtcacgtgctgagagtaagatagaggccaaaacagcttctttaacagcgttagcattggcacctggagtattgaagacaacaatccctttttcagttgcttcgtcaactgggatattgttagtacctgcaccagcacgcgcaatagctttcaagttgtcagggaagacagtattatggagattttgactacgaatgatataggcatccggattttccgctaaatctccatcaatttggaaatgatttccaagttccttcaaaccaatctggttaatattgttatacgtttttacactaaataccataattttattcctcttaaatcaatgtatcccgtggtgagctgcttcatcaagttcttgataaaaggcttgctctcgcttagttttgattttctgataagcaagacgttcaccatcaataggaaccttgccacaatagacatagccaagcttctccaaaatatgctgcatgacagtattcttttcatgcgtatcgcaacgaaaatcatgagcatcagttccctcaataagaccttgaatgaaggtttgagcaatgccctgacccgtaaattcacttaaaacggcgattctatgaaaggtaatgtagcgtttattgtggtgtttccagtccccatcatagattttgtcgtaagcagggtctccatcaacaatcaccgcagcataagaaacgatttgaccatcaacaattcctacataggcctgcccattaaggacatcgtcaaagatagtttcttcagtagggtaaccatcagctccttgccattgggtactccccgcttctgctaaagcagttctagcactctcaatcacagtcatgatagccccaatttcatttgggaaggcttgtctaatttccatctctttacctaattatttattttcggcttcaaatttcttcataaagtcaatcaagtcaagtacaccctgacgtgggaaagcgttatagacactagcacgcataccacctactgaacggtgtcctttgatattcttgaaaccaagagcatctgcttctgctacaaatttagcatccaactctttacttggtgttacaaatgggatgttgcagacagaacgatccttggcatctttgacaggatttgtgtagaaatcagatgattcaatgtagtcgtagagaagacctgatttctcacgttgaatttcagccatcttgtccacgccaccgatttcatttttaacccagtcaaagacgagttttgaaatatagatgttgaaacatggtggtgtattgtaaagtgatcctgcttcagcttgaatacggtaatccaacatggcagacaattgtggttggtcattaaggaagtcttcacgaacgataaccactgtcaccccagcaggtccaatatttttctgagcgccagcatagatgagggcaaagtcctcaacattgtaacgagcagccaaaatatttgaagacatatcagctacaattggcacaccattagtatcaggcaaatcgtagatagatgttccttcaatggtattgttcgttgtcaagtgaacataagcagcttctggatcaattgttgctgggtcaaaacttgggatgtgatcgtaaacagtttcttctgaagaggccaaaagaattggttcgaaaggaatggtttttgaaagtttaacagcttctgtataagcttttttaccccatgaaccacctacaagatagtaagctttcttaccttgagcgaggttaagtgggaccattgtaaattgtgttgaagcaccaccttgcaagaaaataaccttatagttatcaggaatggccatgagctcacgaagtgtcgcttccgcatctttaacgatcttgtcaaattctggagaacggtgggacatttctagcacggacataccggaatcttgatagttaagcaattcagcctgcgctttttcaagcactggttttggtaatgtagcaggtcctgctgagaaattataaattgtcataaagacacctccaaaattttaatggtcccattatagcgaattttctgaatattgtaaagtcctaacagtaaaaaacgaacggaattaaccgttcatctttaaaaagttaggtattttatgtatatttctatcaacttttaattttagtatccgtttacttctgcttaagaaaataagctgctccaatcagattagctccattacgatgatgacaggccacaatcttcggacgtttaataattttaccaataaagtcaatctcatggtgaaccttatcaaactggcggttgacctcctcgataagaataggctgggctgaaataccacctccaataacaaaggtttccatatcaaaaatggtttgaagattcaaaatggtaatggctaagttacggcaatagctttcaaaaagtggatagaccattttatctcctacattaattgcctcaaatgcggctaaaccattctttaagtcagagttacctaacacttcattaattttggtaattaaacctacagctgacagagtcatgcctcgcatcaatgaaggctcaactttttccatttgaactggtaaaataaaggtcaactcgcccgcttgaaagtgacttcctggaaaaagtttaccattaattataagtccaccaccaagacctgaacccaaaacaagggctgcaccattggtcactccttgcaaatgacctgtggctagctctgccaaggccgctgctttaccatcattaagtgccattacaggcagatggtacttggcttcaaggacctctttaatacgaaagccgtggaagaacctcaataagccaccatgataaatcacaccttcctcagtatcaaccgtccctggaacactaattgctatacctgataagtctacttcaactgaagtaactatctgatcaatcacgtcaatagcttgttctaagttttgtggggatgactgcgtcggcagactctttttaatggcgaactgctccgaaacaagtgctgacttcacctgtgttcccccaaaatcaatcgctaaaatcgtcataagcatcctccacagattgtttttcgtcattataacacaaaagagcaaaaactagaaaaaacggttccaaaatgctatcataaacttacagaattagataaaaggagtatctcacatgactaaatttctacacacttgtgtccgtgtcaaggacctagaagcctcacttaaattttataaagaagctcttggtttcaaagaagctcgtcgcaatgattttccagaatataagttcacccttgtctatttacaactcgaagatgatcctgattatgagttggaattaacctataactacgaccatgaagcttatgatctcggggatggatatggtcatatcgccgttggtgttgatgacctagaagctacacaccaagctcacaaagaggctggctacactgttacagacctctcaggtcttcctggtaaaccaaaaatgtactactttatcactgatccagatggctataagattgaagttatccgtttgacgcaattcctagaaaaataaaacaaaaaaagtcagatcgtatagatctggcttctttttgtgcttaatttttattatctgtctttaaggctgacaaaatttgggtacgaatatcatccacaccgtttggattatttggtaggaataaggtttgattgcctttagccgcaaaagtattaagcgtatctaagtattggttagtcaaaagaatagacataatctgctcttcagacatacccacattggcctctttaagttctgcgattgattcagccaatccatcaacgatagccttacgttgttgggcaataccaaccccgtgaagacgatctttttcagcttcagcttcagctgctgtgacaatcttaatcttatcagcttctgccaattcttgagctgcgacacgcttacgttgagcagcattgatttcgttcatagactgtttaacttcagcatctggttcaactttggtaatcaaggtcttaacaatgatataaccatatgttgtcatttcttcggcaacttggtgttgaacctcaagggcaatttcatctttcttctcaaagagttcatcgagcgtcaatttaggaactgatgaacggagagcatcctcaatgtatgatttaatttgagcttctggacgcatgagtttatagtaagcatctgtaacattttgctcattaacacgatattgagtagccacattcatcatgacaaagacattgtcctttgtcttagtctcaaccacaatctcactttgaagcaaacgtagttgaatacgagcggcaattttatcgataccaaatggtaaacgcatatgaatcccactcgttgcaattttttgataacgtccaaaacgttcaacgatagccactgactgttgacgtacaacgtaaagcatactaatgagaattcccaaaataatcaggaaggaaaacagtaaaaaaagaagtgctgcttgcatgttaagtcctccaaaataaacattaaaaatttctttgctttattatagcacagcaatacaatttttcaagaaaaatagtatggctcatttgaaatagtgtaaaagagacactttctttatcgcttatgtgttagcactcctgaaaacttggaaactcctgttagtcgagaaatttgttcgcaataggtgagacttttcgatgtaagaaaaaggctgaaacgattgcgtttcagcctcttagtattttcgaaaataaaatcgttggaagaatcattctagatggcatctaaaactcaaatctcaaaagacttatttacgatacatcttgacttgaaggtaaatatcgttatagattcctagccatttttgtcccaagttgttatagacttcaaggtttttaatggttgattctgatggataaaaggctttatcatcagtgatactctttggaagcaaggctttagctgcttggttaggtgtggcataaccaatatattcagcattttgggctgcattttccggtttaagcatgaagttgataaaggcataagcctctttttcatgctttacagtcttaggaatcaccagattatcaaaccaaagatttgagccttcagatgggacaacataacgtaggtcctcatttttatcaagcatctcactagcttcccctgagaaggttactccaatggccgcatcaccttgaaccatgtagcccttcatctcgtcaccaacaatagccttgatatttggtgttagactattaagtttagtttcagccaaacgtaattcagtcatgttcttcgtattcaagctatatcccaggctattgagtgagaaaccaaggacttcacgcgcaccatcaactagcataatctggtttttgtaatctggtgaccaaagatcatcccagtgctgtggtgcttttttcaccaattttgtattataaacaataccgacagttccccagaaataagggatggaatagtcattgtgagggtcaaaactaagtcctttaaagcttgggccaatctggtcaaaacctttgattttagatttatccaacttcaccaaaaggtcttccttaaccattttatcaatggtatagtctgacggcacagcgatatcgtaggttgttccgccctgcttaatcttggtatacatggcttcattggaatcaaaggtttcgtactgaaccttgatgcccgtttcttttgtaaacttggtcaggaggtctgggtcaatataatcaccccagttatagataactaatttgtccgacacatttcctgtacgactctgcatgtaggcagagatgccccaaaggaagaagaaaatggctaagatacctgccagaaattgatagagtctacgcatcctgctcctccttctccttggtaatcgcataataacctatcactaaaagaatagagaataggaaaacaacggttgacaaggcattgatttccagagaaatccccttacgtgcacgtgagtaaatttccacagcaagtgttgaaaaaccatttcccgttacaaagaaggttactgcaaagtcatccaatgaataggtaaaggccatgaaataaccagcaataataccaggtgtcaagtatggcaacataacctcacgtaacatctgccattgagttgcacctaggtcataagcggcattcaccatatctcgattcatttccttgagacgtggcaacaccatgagaaccacaattgggattgaaaaagcaatgtgactcaataagacagatacaaagcctaattggaaaccaatcaaggtgaagagaatcaagaaactagcaccaatcatgacgtccggtgcaaccatgagcacgttatttagggataaaatcccagtctgttgcttttgtttactctcatagataaagatagacccaaaggtaccaataatcgttgctagaagagcgctaaggaaagctaaaaagaaggtttgagtcagaattaacataagacggctatctgaaaacatgctctggtagttatccagagtaaaacctgtgaaactattcatatcgccaccactgttgaaagagtaggcgattaaataaaagattggcaggtaaaggataacaaagacaagagctaaatagagatttgcaaattttttcattgacgtctctcctttgttaaccacattgtcgcaatcatagcagcaataagaacaacaccaatggttgcccccattccccagttttgtgtcgtgaggaaatgctgttcgatggctgtccctagggtgataactcggttaccaccaatcaagcgtgtcagcataaagaggctgagactaggaatgaagaccgactggacaccagagcgtaccccattaagcgataagggaaaaataaccttggtaaaggtctgccaatcattggctcccaaatctttacttgcattcacaatattttcatccaaatcatccagtgcattgaaaatcggtagaatcataaagggaatttcaatgtaactagctacgaaaataaaggagaaatccgtaaagaggatttgcatgggtgcaatcccaaagaaaccgagaaaggcattgataccgccttgttgaccaaaaatccccataaaagcataggctttcagaaggagattgacccaggttggcaaaatgaccaacatcaaccaaagttgcttatgcttcagtctggttaaaagatatgccgtcggataagagataataagcgttaccagagtaatgatggctgcataaagaaccgagttaaaactcatccttaagtaagtccaactggaaaagaaggtgccataattatccaaagtaaagttgccactgatatcaaagaaagactgatagagtagcatgagcactggagcaaccacgaagagtaggagccaaaggaggtaaggtaccgagaagaggctagctgttttcttcatagcgctcctcctcaatggcattaatcaagccatcttcatgttcttccacttccacatattcttcaatacgtgcatcgaactcttcttctgtctcattaagacgcatgatatgaatatcctcaggcgtaaaatcaagaccgataatctcaccctcaatcgccttacgggttgaatgaatcatccattcattgccaagattgtcataggcaatgatttcatagtggaccccacggaagagctgagtttccacgcgaacttgcaatttgccttcctcaggaagtgtaatctgcaaatcttcaggacgaataaccacttcgacaggttcgttaggacgcattcctccatcgacagattcaaaacgtttcccattgaactcaaccaaatagtcctcaatcataacacctggtaggatgttagattctccaataaaggttgcaacgaagtgattaatcggttcatcatagatatcaaccggagttcctgattgaacaatttcaccatcattcataacaaaaatccagtccgacatggccaaggcctcttcctgatcatgagtgacaaagacaaaagtaatccctaaacgttgttgcaattcgcgcaactcgtattgcatttcagtacgtagtttcaaatccagtgctgacaaaggctcatccaaaaggactacacggggttggttaataatcgcacgagcaatagccacacgttgacgttgaccacctgataatttttgaatcgagcgcttttgataaccatttagttgaaccatctttaaggcttcttctacacgctcttcaatttcctttttaggcacctttttcaatttaagagcaaaagccacattgtcaaagacattcatatgtggaaagagagcataagattggaaaacggtgtgaacatcccttttattgataggaatatcattgatacgttttccatccaaaaggacgtcaccactggtcgcatctaatagacctgcaatgatgttcaaaatcgttgatttaccagaaccagaagccccaagaagggtatagaacttaccttcttctagttcaaagttgatgtcttttaaaacttgtgtgccactgtcttcaaacacttttgagacatttcgaaaggcaataatcggattagtcaattgtcataaatcctccatggatagcaaatatagggatagggttttattagtttaattcgtcgccaatgatacgtacttcaggctctagtgtaacacctgaattttccttaaccttagctataacgtctgaaataaggtcttcatagtcttttgctgttccttgatcaacattaaccatgaaaccagcgtgcttagttgacacctcaacacccccgatacgatgtcccttgaggttggcttccataatcagctgaccagcaaaatgacctggtgggcgtttaaagaccgaaccacatgaagggtattcaagaggttgtttaagttctcgcaaatgattgagacgattcatctcattcttgatttgctcgtagtctcctggtttgaggttaaatttagctgaaataaccacttcacctgtttcttggagcaccgaacgacgataaccaaaacgcatatctcttgcatcaatcgtacgaatatcaccgtcttttgtaagaacctgagtagaaaccaagatatgagcaatctcaccaccataggcacccgcattcataaagacggcaccaccaacactacctggaatccccgctgcaaattcaaaacctgtcaaactttggaaacgagccaccttggttgtcgcaatcaaattagcccccgcttcagcttcaatttgataaccattaactgcaataccattaagtctgtcaaacataatcacaaaccctctgataccaccgtcacggacaatcaaattactggcattaccgagcaccatccaaggaatgtcatgcttattagcaaatttgacaatacgagagagttcatagcggttacgtggaaaggccaaataatccgctggaccaccaaccttggtatatgtataacgttttaagggttcgtcgaaacgaatatcaattcccactaaatcttctttaagttcatctaacatgttattttccatactttttctatacatttatttctttgtaggtatcgtgatagacttccccatattactatcactacctaaaaatgagttagtatttttccctaaaaataaaaagaaaaatacagcaaaaagccaagattaattatagcaaaaaatccccatcttgacgacaaggaatttcacgcaaagctagtccataacttccaatttgcggacatcactagtgtctaattgactcaaatattttttgtaggcttgaccagttttagggtcaaccaagtcatctgctatttctatcaagggaaccaaaacaaaagctctctgactcatataaggatggggcactttaaggtgctcagtctcccagatttcctgcccatatagaagaatatcaatatctactgtccgaggcccccaatgctcatgacgaacgcgatcaaggtctttttcaatctgctgacatgaccttagtaaggtttcagctggcaactgagtctctaagaccaaggcaaggttcaaaaaatcagcctgctctgttaatccccaagcagccgtctcataataggaagatactgctttaacctctgtctcaggtaagtcattcaaggcctccacagctttttggagatagtcctgacgatcacccatattagatcccaaactcaaataaactcttgtcatcggctacgctccaattcaattccaacacttctatagtgcccattaattggtggattttctttagtaattcgaattttaatagattggattggcacaaattgatcaaacaagtcctcacaaatcgcacccgccaaacgctcaattaaaatgtactttttatcttccacttgtttttgcacggcttcgaaaaccaaaccatagtgaaccgtatcatctagattgtcactctgtgaagccctgatcaaatcaacagccagttccagatctaccacaaaaatttgcccaagggtttgctcctcagcaaaagccccatgatagccataaaaacggcaaccatttaaaataattttatccatagtttctccttaagacgactatactcctctttattctagcacaaaacagttgaaaagttggtctctaattagtatgatattttagacagatctgaagttattgtgtttacgcttatgcaatcggttgcataattcttctgatttggtaaaatataggcacaggagttaaaaagactcctgattacaagcaagactatctcaactaataaggaaaaaaactatgactaatcaaaccgcaatgcaatactttgaatggtatctcccaagtgacggacaacactggaacaatttggctgaagatgcccaacatttagcagacctaggcatcagccacgtttggatgccacctgcttttaaagctaccaacaaagatgacgttggttacggagtctatgacctctttgaccttggagaattcgaccaaaaaggaactgtccgcaccaaatacggccttaaagaagagtatctcaatgctatcaaccaactcaaagaagttggtatcgtacctatggccgacgttgtgcttaaccacaaggccgcagccgataaactcgagaccttcgaagtggtcgaagttgacccagaggaccgtacccaagaaatcagcgaaccatttgaaatcgaaggctggacacacttcacctttgacggacgcaataaggcctacaacgattttgaatggcactggtaccactttaacggaactgacttcgatgctaaacgtaataaaagtggtatctatcttatccaaggtgacaacaaaggttgggcagacaacgacttggttgacaatgagaatggtaactttgactaccttatgtatgctaacctagactataaacaccctgaagttatcgaaaacatttatgaatgggcagattggttcgttgaaacaacaggcgttcaaggcttccgcatggatgctattaagcacattgattctttctttatgcgtaattttattcgcgatgtcaaagaaaaacaaggtcaagacttctatgtctttggtgaattttggaatggtaacgaagaggataacaatacctatcttgaaaagattgaaaaacgttttgacctcgttgatgttccccttcacaacaatctacacaaggctagcttagatggtgccgattatgatttgacgacaattttcgatcattctttggtcaaaaatcatcctgaacatgccgtgaccttcgtagacaaccacgacactcaacgcggacaagctctagaatctactgttgaagaatggtttaaaccagctgcttatgctctcattcttctccgtgaagacggtcttccttgcctattttatggtgactactatggcattgaaggtgaatttgcccaagaaaatttccaagagattctagataccttgctctacgctcgtaaagacctagcttacggagagcaaacagactactttgatgatccaaactgtattggatggacacgctctggcaacgaagatggcgctccattagctgtaacaatctctaatgatgctgctaacagcaagtctatggaaattggtagtgattgggccggccaaaccttctatgacattcttggaaactgctctgatactgtaaccattgacgaagacggatggggagacttcccagtttctgaaaaatctgtcagcgtttggacaattcaagactaagaaaaaaaaagctcaatcgagctttttttagtatcataaaatccctgaaatggtcttaacaatatcacgattggcatcaacattatgcacacggacaatctgacagcccttgctaacagcatagccagatagagcagccgttccctgatcacggtccttagcttgggtatttccacctagtaggtagttcacaacacgcttacgagaaatcccaaaaagaacaggatagcccaaggcaacgaccttgtccaaaccttttagcaggtcaatattgtgttggacatttttcgcaaagccaaagcctggatcaatccagatattgtccttggccacacctgcttccaaggcggcctgggctcgttgactgaggaatgtacagacatcttctgtgacatcattgtatacttcttctttttgattatgcatgagaataatcggcacattcttttcagctgctaaagctagcatctgaccatcatagagtccagcccagacgtcatttagaatatctgcccctgcttcaagagcagctctggcagtagctgtcttataggtatcaatactgatgagcacatcatattttgccttgatagcctgaataactggcacgatacgagcaatctcttcttcctcggtcacaaattctgctcctggtcctgtagattcgccacctacatcgataatggcagctccctgggcaatcatacgctcaacctgagccaacgcatcctctacagtgtcaaaatcgccaccatctgagaaagaatcaggggtgacattcaagattcccataatacaggccttacctgcaatctcatgtttgccaataaacatcttaactcctaaaaatcacgcatcaatgaaagaatttccttgcgttcttcacggtcttctttataaaggcccttagcgacagttgtgattgtcttacttcctggtttcttaatgcctcgcatggtcatgcacatgtgctctgcttcaaccatgacaaaaactcctcgaggattcagagcttcttcaagtgctgtagcaacttgatctgtaagacgttcttgcaactgtggacgacgagcagctacttcaaccgcacgcgctaatttggaaagtcctgtcaccttgtctccacttggcaaataagccacatgggccttaccataaaatggaaccaaatggtgctcacacatagagtaaaaaggaatatccttgacaaggacaacttcgtcatggacttctgaaaagacagctgtaaattgatccttaggatcttcatttagacctgaaaacatttcagcatacatcttagccacacgttttggtgtgtccaaaagtccctcacgctcaggattttcaccgagagcttccaatagttgatagactgcttgttctactttttcttgatttgccataatttcctcctgcaacgttataatactatctattataccttattttgctggatttttcttgcaaaaaataagatttcctagctacctaaacctcaaaaaaagcgaagaccacctttcatatagaggttatcttcgcttatattttttagtctttcaagtggtaagaataggatgaaactacaatattctcacgccatttgagataatatttcaatcgtaaactcatttggttgtgaagcatggtttgccatgattttttaggtacaaactgaggaatcatgactgtcaaagtcgcattatccttctcagcttgagtggcgacctcgtccacatactgaatggttgactgagtgattgagctgtatggtgattggatatgaaccatctcaatttcaggaaaatattttttaaactcttgttcagtttccttgtccttgttctctgtatccttagtagatacatgcatggcgataaccttgtcaccaatagaacgcgcataggaaatagctccgatattagccttggtaacattcccaacgaggataagaacaatatttccttgataatggtgttcttctaccgctccatcaatacacaactgttgagcaacaccattatagtgttttttaatcttaaggaacatccacatcaagattgcaataattgggaagaatggccagatatctcctaaacggaaaaggaagagaatgagaacaatagcataacaaatgagggcgcccaagatattagctaaagagtgtttccagaatcccttaccatattcacgaatccaatggataaccatccccgtttgagaaagagcaaatggaataaatacaccgatggtataaagcggaatcaaccgttccgtatttcctcggaaaataaacaaaagggtaatggcaccaattgcaagtgtcaagatcccattagagtatcccatacgtgcccctttttcaaggtacatatgaggcatgtatttatttttcgccatattaaaggacaacatcggaaaggctgaaaaacctgtgttagccgctactgcaagaatcatggcagtagagaattggaaaacgtaaaatagaatactaccaatccatgactgaccgagaatttctctagccatttgtgacaagatagttactcctgcatgaggcgtaataccagtccaccagttgaggaaggtgattcccgcaaacatagcccccaaaatgctagacataataaagagggttgaagctgcatttttggccttaggtttcttaaagaaaggcaccgcattagagatagcttctacccctgtcaatgaggcagaacctgaagtaaaggcccttaaaataagaatcaatgatacacctgtaattggttgtcctaaatgtgctgtggctgcgtaaggcatatgacccgttaaaatttgaaagaaaccaaatcccaacaagaagagcgtcgaaacaatgaagagataaactggtatcatcaaagattttgccgattcacgcattcccctaaggttcataaccatcaaaacaagcaccaaaatcattgatatttcaagattgaaaggatgcaggaagggaagggctgaagtaatggcatctgcacctgaggccactgaaacagcaaccgtcaacatgtaatcgaccaaaagactaccaccagctatcaagccaaacttaggagacagattttccgtcgttaccatataggcgccaccaccttgaggataggctttgataacctgtctataagagatggtaagactggccaaaagaacgagaaccaaaagtccaatagggattgaccaccaaatagccgcactagatacagctgtcagaaccaaaacgacttgctctggaccataggcgatagatgatagcgcatcactcgacaacatggccaaggcctgaatcttggacaataagtgttcatcaccactatcatcatgagttaaaggttcaccgattaaaatgtttttcagacgttgaaacattgtgatctccttacttttaaaacatacgagggctattatacgcccctaaatgtcatctttcaagtcttaaccatcacttgcctgctctaaaacccattttctgacctgagaaatgaagtatagagatcccgttaccacataaagtttcttattgtcagtcgtcacatgttctttaatccatgttttgaagtctggtacctgcttataagcctctgggtatttatctaatttaacactgtttggatagtcaaaactcgttacagtcaagtcaccaaccgattttagttgggcaagcataccgtcaataggcttggtatcaatcgctgcaaagagaagttcaatctccttattggcatactttgattgcaacaagtcaatcaaaactttaacactctcattattatgagcaccatcaatcatgagattaggtcttaaaaattctgttcgacctcgccaatgggcatgagccagggcattctttatgagttcaagagttactttaggataatctttttgaagcaataaagaagccatgatagccaagctagcatttgccacttggtgttgaccggccatagccaaggctatatcatctaacctttgctctccataggtaaaatcaaaggaatggcttgacccttcagctgtgaaatctctccccagctcataggtcttagaaccttcttcacgcgccttcttctcgaaaacatctcgaacatcagtacggtcagtcgcataaataaagggagccccattcttcaaaacaccagctttttctgctgcaatttcagcatgggtatttcccaaaatagcctgatgatctaaaccaatcgatggacacaggactgccaagggcttaaagagattagtcgaatcatgaagaccacccattcccgcttcaatgaatgcgatatccacaggatggatctgaccaaaatagaggaacatcaagactgtgataatttcaaactctgtcgcattttcatgctctgtctcttttggtagacgttcaaccacaggcttcacacgattaaccaggtcaagtaagtcctcttctgaaatcatctgaccgttaagagagattcgttccttgaagtcaataatatagggtgaggtaaaggttccaacctcataacccgcctgggtaaaaatggtttgtagggcattgactgtagaccctttgccgtttgttcccacgatatgcacagccttgagattatcttgtggatttcccaactctttaagcatccaagccatacgctccaagccaggcttgatgccaaattttaattgtccatgaatccaatccaacgcttcctgataagtcataattactccttttttaggctaatgcttcaacttagtcattaagctgacctctaaactagatttctagtttttccttgagcttaatgctttgacgctcttattataccaaagacttctaggtataaccaaaatatgcaaaaaaggcaaccctagggtcacctcttaagctttctctttttcgtcaataacaagacgaacttttttaccttgagtaggtaccgaatagacaatcgctcttatcgccgtaatagtacgtccttttttcccgataacacgcccaatatcggctggggcaagatcaagatggtactccaaaaactcaggaccgtcaataattttgatggtcaactgatctggtgaagcaattaaaggtttaacgatagcgataataagattttcaatggtatccataggctaaaaaattattttgagaattttgattcgtggaatttcttcataacgccttcttttgaaaggatgttacgaactgtatctgaaggttgtgcacctttagacaaccactcaagaacacgttcttctttaagtgttacttggttttcttcaacgagtgggttgtaagtaccaactgtttcgatgaaacgtccatcacgtggagcacgtgaatctgcaacgttaatacggtagaaaggttttttcttagaacccatacgagtcaaacggatttttactgccatttttaatatctcttttctttagttttttattatggtgggggcacttatcgctcctcgaccttaactagtataccatatcatttttatgtgtcaagaaaaaaacttgacagacttaaaatttctacaaaaaaagttagagtcaaactctaacttccttttcgactatttcttagttgtagtcttatgatttttttcataagctacctttgcttcagcatattcagcttctaaacccttagccgctgcttttgatactttctcataagtatcacgactggtcaatttgccatcctcgttgtaagtagaaacaaccaaggtatctttatttacagtataagacttggtgcgtttccctttacggtagagtcggtagttatctacgttatccgaaatatagtaatctactagattcttatctgcatttggataaagttgcgagacaactttagtcaactcacgcttaaattctgaaacttccttagtataggtgatcgatttattccactgatcaacaacttgatattccttcaaataatctgaagctgtaaaagtaggctgatcctcctcaccttttttataaaagtaagaatgtgtttgtaaattattagactgatcaactttaaggaaagagacataaatttcatctttatcttcatgttctttcagagcattggttaactttccagaattttcgtccaagaccttagacgattttaattcccaagtcccctcaatattccccgaagcattacgccaaaaaccgtatactccaccaacaagcaacatcaaaacaacagcaacaagactagaaatcaaggctcctttgccccaatttttggtcttttgcgatttttgattagcgttttgaatcgtttcgagaagacgaacctgactttccaatctcttttctagtttggcaactgtctgttcttccttagatttagctttagcagctaatttttcagcctttttcttatcacgagcagcttgacgagcaatcttcttagctgctttttcttccttatgatcaagttttgtcaaatcttcagacaatccaagatgctgtgcttggttactgaaaactggaatagattgattaggctcactcgaggtattaacagaatgatttcctgcatctggacgggttggcgcataacttgctaaacgctccttagcctctgcaacacgttttcgttgttcctcttctttttgaatatcctcagcctgacggcccgactgaatggttcttacttgaccaacagtctcttgagatagggcctttctcttttcttgggccgcatttgccatagcctcttgcgcgttgtcacgctctttctgagactgggctagtgctctggcagttgcggttccttcttcaaactgttggtcagctgatgattctccttgatcagctacttggtgagcctctgcaccttcagagagaacaaactctcctcgttccaaggcttctttaaagtcgattggtcttggttttcggccattcacagcctcaaagtactctaaccattcgtctttcaacataataaatccccctgaattaaaaaacacatgattaacttccctattttaccatactttttaacataaaaatagggattaacaagaattctaaaaattcttattaaatccccattaatcttcttttggtgtaatagacaataattggacaaaacggtgttgtgctgattccgtttcaagcgtgacattatcatatctaaagagaatctcttcgatatttgccaagcccaatcctcgacctgttccttttgttgaaaatcctctttgtttcaaaggagccacatcaatagaagcttccttagttgaattctcaacaacaataacagattgattttccatcttaaagatagcgatagataattttggttcatctgctaatacagtagcttcaatagcattatcacaaagaatggatatgattgtaatcaagtcgagtggacgcatatctgtgaagaagacaccctcttcaacctcaacatgacatttaatacctttatcaaaagcttcggctactttagatgacaaaagactcttaagcggcatgttggtcacacgagttaattttgccaaatcaaacttttgctgcttcaaatctgatgccgaatctttcaagacaccatcataaatcatcttgatttggtcgatgtctttcatctgaatggcttcattaagcgaaatcataacattagtatagtcgtgacggaaactgcgtaacgtttcgtaaagactttcgacttgttcagaatacttctctaggtcatccaagtgacgacgattttcttttcttcgctcattttcaaagtactcatctgcgtatctattgacactgtaaacagcataaagaatcgctatatagccaatcaaggttataatatggccagcatagtacaaatcaaagaaacgcgaagccacaactacggaatagttcataatcacataactaatcaaaacaaagttagtgaaaaacataatccgaccaaatttgcgatctcgctccaagaccctcaaatatttaaaatcaatattaagaagtttggaaagagcgacaaatgttggaataattaaaaggtcaaagaaaatgaaataaagataacttttgttaaggaaatccgatgtgataccaaatcccggcatcaaaaagtaggcataaccattaaaaatcaaaagataaagaacaagaggatagaaggcataaaatgccaacatattggtggttctttccttgccatagaaatatgcatagaaaagaaggtagaacggtgtcataaaggacaaaccgacattatatgacatccccagtattccccctatacattcaaccaggaacgcaataggaaggatcatacgtggtaccttgaccaagctggtcctttcgtagatccactgtatgacaatgaaatgcaaaagatattctaatgcaatttgcaaattgagcatcatttaatggttagccacctccttctagtcatctctaaatatacggcaaaaagccataacactattctatcacaattcctgataatagatgagataaaattaaataattatatcgaatttcagaaaactttcaataatgattagagaagaaggggaaaatctaagacctaacgatttttcaaacgttccaaaagttcctttttacgtgtccgcgataggaggcatgactcgttttcctcaaagaagaccatattagctgtacgatccacacttgtcacattattcacattgacaacaaaagagcggtgtgtttggaagaaaatatcatccaattttgctacttctgcaattttcccatagaattccactaggtttgacttggtatgagcgattaacttatgtggcacaggggctgtctcaatgtataaaatatcatcataaggaatattaacatcatttttatccgttttaacagttagactctgtgccttggtttcttgctcaacctgtgaataagcaaaatctaaaagttctaccaaagctctcttaagatccacatcttccatggatttatcgacaaagtctagagcttgaatcttataacggaaggtcaagggcataaactctgaataggctgtaacaaaggcaatttgtgctttcaagtcttccttacggatttcaagcccaatatctagtccctgcttagtttgatttttaaggtcaatatccaaaagataaaccatggatttacccgaacctctatcagcatctaacaattcctgaccctgttcataaaaagtaatcccatcaacaacggccttcgactcctcaactgcttcgtccaataaacgaccaacacgatgacgctgcaaggcatcatcttcaaggacgataatagaaagcatcttatttccctctttctctctaatatactttaatatacctatttaacattttatcataattaatcggagaatattcctttttttacagcataaagtctttttaacttacctcatttcatttataaaacaattgttatcttcctgtcactttatcttcatttttagatgttatcatgagagctgtttttgttttatattaaaaaggagaaagttatgttacgttcttttaaaacacaagggactaagacaaagactatcttaacccttgcaactgtcggtatcattagtgcttttcttgtgggaaatcctcagcatgcctctgcgaatcaaacctatgtttcagatcctaaccaggctatgacattttctgaacttgaaacagctacaaataccaataccatcactcaaacaggtgtatctagtgaaacacctactactgtgactactgtgtcacatacccctgtggatgatattcatacacatgaaaatgactatgaacaaacgcccacaaatactccgacttttgaggaattgaaacaagatagtcaaacagctagcagtactgtcgacagccagactggtagcaaaacctatgagactagaattccgacaaatacagatagcaatcataaggctgtagaaaatcactctgaaccaaagaccgaaactgtcgctcaagcacaaacctggtcaaaagatggtgctacatgggtgtcaacagaaattaataatggtaacgttcataagattctatctacttatattccaaaaccattaacaccttctacaaagcccacgacaacagctacaccaaaacctaaacaatcaactcctgctgttagtcaacctaaaaaaccagccacagtcgctaacaaacctacaacacaacctaaaaagccaacaacgactgtcactaaacctacagctcctaaagctactcctatccaacctactaagccagtggaccgagttgctcaagtatggcaaaagaataacgaactggtaaaagagaattacgactctcctcactggtcaactaaggaagcaacagtcttcatcaatgctaagaatcctgaaatcgtgaatgcctacaaacaagctatcacttcttggaataacactggtgcctttaatttcttactcactaacgataaacaaaaagctaacatcattgctgatgaacgttatgaaggtaatgtagcagctcctcttggggttacctactctacttactacctcccaactaagcaatatagtaatgctactgtttacttgaatagcttccatgttcaaaacaattattatcaaaagaatggtggaaaactccttaacactgcgcaacacgaattaggacactcaattggacttgagcacaacagtgctgttgcctctgtaatggaacctaaaggtggtaagacaagtatccaaccagttgatattaacaatgttaagaaactctatagcaagatttaagttcttacaccatcactacaatttataagcagacctatcaggttctgcttttttgatacaagtgagatgaccattcaagaccagaaaatgactgttcatgattttttcttacatattttaaaaatatgtaaagttttctccgttttttttggtacaatagataatgtaaagagagaccggatgagttagaaaactcaactttgttagtttttgctcattattctcataaacagaataaaaatagtctaggaacccttcttaacatttatacctatcttccccaaacacttttcccccattcctagatttccagatctctcctaataaagaacgtctagcaacagcagctaggcgtttttttttatagtatctaaagcacataggcgttggtattagctaactagattagtaatcgttcaaaataattctcacaaaattaccattcaagaccagaaaatgactgttcatgattttttcttacattttttaaaattgtgtaagttttctctgaatttttttggtacaatagacaatgtaaagagagacctaatgagttgtagataagtgttttatcatttaaaacttattgttctcataaacattttctaaatagtctaggaacccttcttaacatttatacctatcttccccaaacacttttccccattcctagattatcagatctctcacaagaaaatcgtctagctcacccggctaggccttttttctttttccatacttttgctataatagagccataccgtttgaaaggaactcataaaatgactatagatcagcaacttctttgctacaaacgtttaccaaactggacagctacaacacttccagaaatggtgacgcaaaaacacaatactaaggtgggaacttgggctaaattgaccattctatcgggatctcttcacttctacgaattagacgaagagggagaggttactgcagagcacctctttacctccgagacagagattccttttgttgaaccacaagcttggcatcgcatcgctgctgcttcagatgatttggaatgctatctttctttttactgtaaacctgaagactacatggctaaaaagtatgacactaaggcccactccgaggttcttgaagcagtccaatctggccatatcaaacctggtcgtacccttgacctaggctgtggtcacggtcgtaacgctctttatttggcatctcttgggcatgatgttacagccgttgatgttaataacgaagctacacaacgcatccaaatgattgcagatgaggaaaattacaatgttagagctggttactacgatatcaatgctgctgctcttcctgagtctgagacctttgatttcatcctctcaacagtcgtctttatgttccttgatcccgatcaaattccggctattatcaagaatatgcaagagcgtactgttgtcggtggctacaacctaattgtttgtgccatggacactgaggagcacccttgtaccatgcctttcccatttacgtttgaagaaggcgagttgaaaaactactatagtgactgggaattaatcaagtacaatgaaaatcttggtcaccttcaccgattggatgagcatggcaatcccatcgcccttcaatttgcaaccatgttagctaagaaggttaaataagagcgaatgactgtaaaagagttgagcacagcttgacttgtcttcaaattaaaaactaggattccagttggaatcctagtttttaattgtttacaatatctgcatatcctgatttaaggtcagcattttccgtttctttgacataatacacgccaccattagtagttggtgaataaagaacaaagggagtcccatcttttttaatggtaaagaaataacggtgaacagatacattttcccatctctcatataccgaaacaatagtatactccgaattgctattaccatttgcagcataagtagcatcgacagtctggctatggtccgacatccaacggataggcaaggaagaggcttcattggtaatttctttgtatcctggctgattcatctgattgccccaagaaaccatcaaactagcaagtcgactagctttgtcattggtccaacgtggattttcagtataggcttccttagcatggttagcgtcaggtgtatcaatacttgcactgctagattcactcgtcttcgcattttcgattgatgacgtacttggcttggcattagccttatctgtcgatgagaatatcgagctagccactgtggcagacgacttagtctgtttgacgttcttcattgaactagagactagagtcaagccaataccaacgacgatcgctactagagctcccagaagaatatagatataattataatttttcgagatttcaataaggccagactgataagctaattgtagttcatcaggtttcggtttacgcccttgaacttgctcaaaacgatttatccattctgcttctgatagctttcgcataattttcctcttctctttatcatttcacctttcatcctatcatagaacagggatgatgacaatagtagagagaacttgaggcttaccttcaacctattatcctttattttcaaaataacgacgaacaatcggcgccacttcttcaccataaagtttaatagcctttagaacagcctcatgtggcatagaaccaattgggagatgaagcatgaagcgatctagctgtaaatcctcaataatacgaatgattttttgagcgacgtgagcggggtccccaacgaacatggctccgtttggtccaacactagcatagtactgctttttagtcatttcagaccaatgtgggcgatccttagcaatgttatccaccgtttgtttcgttggataaaaataattttctatcgcttggaaattattttcttcaatccatccccaagaatgagcagacaattcaatttcttcaacgagctctcgaatacgttggtcatgagagatagattttccagtcgattctaggagggttgtttctccaaaagttgaaatgccaagttcaatcgtcataaatctttcctccagtaattcttttatttgttatgagaatacattataactagttagtgataattacaaataaaaaaacctaagactctattttccaagaaaaactaatagggttaggcagaaaagtaaaactaaaacacccacaactagtaggagactaatcttatagcctaggggatttttgggatttaaaccagttccaaggccatacctacggaggacaaataagggttctgaaggagactgattaaggttgtagcctaagaggtactttaaataaagcaggaagaagaaactcatccccggaaaaataacaagaggaagcactagcccctgtgaccaccaaatcatgattgtaagaaagacttgtatcaacaagagcacccaaaacaagtaataaatgtacgattgctttttcattaatatgtacctctcaatctaagattagtatactcctcctagcttcccttatcaaacccataactcgcctgacaccttattttctgctacaatagaaaggaaagattcaaaaaaggaaactgtacacatgaaattaatttcttggaatattgattccctaaacgccgctcttactagtgattctgcacgcgctcaattatcacgtgctgttatcgacactttagtcgccgaaaatgcagatatcattgctattcaagagacaaaactgtctgccaaaggtccgactaaaaagcatttgcaaatcttggaagactacttccctgactatgacaatacttggtgttcatctgttgaacctgcccgtaaaggttatgctggaaccatgttcttgtataaaaaagaactgaatccagtcattacctatcctgaaatcggagcaccttcaaccatggactgtgaagggcgtatcataactctcgaatttggcaatttctttgtgacacaggtctacacaccaaatgctggtgatggcctcaaacgtctacttgaacgtcaaatatgggatgaaaaatatgcggattacctagctgaattggacgctcagaaacccgttcttgcgactggtgactataatgttgcccacaaggaaatcgacttggctaacccttcaagtaatcgtcgttcacctggttttacagatgaagaacgtgctggcttcactaacctccttgccaaaggattcacagatacctaccgtcacctcaatggcgacgttacaggagcctacacttggtgggctcaacgtagcaaaacatctaaaatcaacaatacaggctggagaatcgactactggttgacttcaaatcgtattgccgataaggttacaaagtcagacatgattgactctggggatcgccaagaccacacacctattgtcttagagattgatttataaagtatctctagacataaatcacaaaaagagtagacctgctactcttttactatgtccaattaaggagaaattatgaaaaccaaacttaataccactcaaaaacttgttctgtcagctataatgatggccctttatatcgctattctctttgcttcacaagccgtttcctttggtgcggttcagatgcgtctggccactgctttatatggattaacttatatctttccatttttggtattccctatcagcatagccaatgctattggtaactcttttggcggattgggattgattgacgtggttggtggtttctgtgctagctttttaacaactggtagcatctacctcatccgtaaagccaagttatctagctggttcatcatccttccaatcctactcgttcctgctttagtggtaccaatctggcttagtgccttgctcaaacttccttattttgctctcgttattaatctcctcctgggacaattagttccttcaatcttgggagctgtccttgtacgagagttggctaaacgaggatataaagactgacaaacaaaaatatctctgcaatgtgcagagatattttttagtaatcaaaagctttttcgtaagcttcttttggtgtcaatttgtcaccagagataagcaaacggtagtcaacattagtaggatctttttgatactcatcaacccaatcttgattcatttcgaggtaaagattataagttcccaactcagtcgaaacagtacctaccttgtaaaaatctttataacgcttttggttatccgtttttttcaatttttcatatcgataataagttctggcaaagtcagtgaactggtattctttcttatcttttccagagccagttgtgacttcaatggtgcccttgttatttgttaaatgcaaatcataatcataatcattgtggctattcacttggaaaacacctgaagtaatgtcactatcatcagagaatgtctgaatgtcagcgaacttagcagcctgccaagaagtagggactccttcatattcaccatcactctgtagacctagaagtgaccaataatgaccgagatagaaggtattagacttctcacgatctgtcaccagttcacctaccatcttaaggttttcagcacccagacggtatgggttagaaaggtaaccaaagactgggaagaaataaatgatgactgtaaaggtcaagagggtcttcatattaatcttattgatagcccagaagaaataagcagctgagaacaagagagcgtaagcagcaccgtagctgaacttatgcgcatgggcaatcaaaagtaaaatgaagaaaataggttgaataggacggaccttatgatagatgatagagaaaacgtcctccttgtcttcctcagatttgaaaatcaaggacaagacaatggtcaaaagtacaaagaaggcgccaaagccgaagccaacatcatttggacggaagaaataagccaagatggacatgtccatcaccaaaagccagacagatgcaaatttgatcatgttgttaccaaattttgcagccgtttgactaggtgcctttaaaggtacctcaaaggcctgtgcaagtgctctttctttggcttggcgttcggcctctattgccgctttcatttccttagtacggcgttccttttggaacaaatgggcaaccttggtcggctcatcttcccttgacttggtaatactcaaaaagagcaaatattgcatggcaaagatgagagctgtgttcccaccgtattctaggaaggaaccattccaaatactagaaacaactgtaaaaacgatataacctccaattgagattaaaaccgtcaagagcaaatgaatccaacgatagcggtaagtgtatttatcagttgtatctcgtctcaaaaacgtgtcacgtgggtaaagataccagataacgaagataagttcaatggcttgaactgctgttagaaaaccaacgtagttgaagccaaaaacggctgctaccacattgatgagataggaaataatagccaaaactcgcagactggtgcgcttagacaagagtccaatactcatcagggtgatagttgagaaggcagaaaaaccagcgcccatcttattatcaaagataaacacattgacaaaggcaaaaatcaagattcctagaagagttaagacttgtttttgcatttcttttttcttttctttcatattttccctccttatgaaaatgataacgcttccgtattcctattttaacacaattatactatttttgtcagatttaaaaagacattcggataatcgaatgcctttttcattaattatccattgcttcaatcttaaggaaaacaaaatctccatcaaagcgttgaatatacttttgaaagcctaataaactaaaggtttcaatctcataacgaacctgatcaacaccatcactagcgctttcctctagcagtttaagttttggaatatcggattccaagacatcacggtaaagtcctttatactcaaaggtaattcgagcccactcattaccagaaagcattgagaaagcctgataacgcacctgctcatctgtaataagacgggcttcttgttctggacttaacgtgaaagccaaatcattttcagatttgtgaatggtttgaaaacgatcaacacggaaataacggatttcagagaactgataatcacaagtaaagttatcatccagtttgtatgaaatacagtagaaataatggttatcaaaaatgactgaaattggaaaaaccttatattcctccactttttctcctggcttacggtaactaaaagacaaaggacgttggtccacaatggcatcgaaaatggctgaaatagctggtaagagtgacttatcttgatcctgataaatcttaagttcttgataactatctagttctagctcagtcaatcgcttgatacgtctgcgctccttgtcgtctacagccctctcaacaaagatgttgataatttctgctacttcatcctttcgaagggcacgactctctaaaagaatcttagataggataactgcctgattgtatttaaggttaccatagccctgttcatactgggcatgataggaaccgtattttctggaatacttaaccttcatatttggacgtaactcagtcaaattttccttgagttcactcacgtcctctttaagtgtacgctcacttatgccaaagcgagctaggtagtccgtttttgaaatgtcatttcccttttctaattcggacataaaatacaagagacgtttggtttttgatgctgtcattataaaatccccctttataatcaaaccccttattactaaaaaattgctgtttagttattcattatcatagatagtcatccctagtagcaacgagccacagaattatagctcaaataatagtcctttttcttttcgttatactcaaaagatagtcttaacaattgtgctttctcaataggactattctgatcagtgtaatcaagatcaactgacttatgtatgattcctgatgaatggacgttgatacttctccaggacctttttgcctgagaatgttccctcactacctcaaacaaggatgttgctggacccagatagtcttggtctttagtacgtaagctatttatctgctcttccgtccaattactgctatagttatcaacctcagtgacgccatcaagtggataagtcgctgttccaccatcatagacaaagcgtcccttttcatccttcacaaaagagagatcactatactcattgccatctccacggtcatatctcaccttgagaccactagactccatctcgacataattgcccttaccatgacttttaataatcgaacgtaaggtatcagccttgggtttcagattttcaaaatcttcttccgtccagttataaatcgcagactcatcttcgtagtctttgagatcatcgctatcaggtttatcctcatcaagatctgactgagatacctgctgaatcaacctgtattttttcatagcccctcgatagacagaaccacctaaagtggcaaagaaggatagcacaatcaagccaaccacgattgcggtgaagagaaatctacctagcttctgtcccattctaaagagaatgatagcaaggacaaaacatgccacaattacagcccgatacacaattatcggcttatacttccaagataacaagactgagccccagctcacacttaagagtatcagtggtagagcaagagtcaaaaagaaatgtcgcttctcagctttttcctcctgaaaagcagattcaaactctggtcctttattactaaaagccgactcgaaagcctgatcaccattctttagatgatcatcacttaaataatcttcgttctctttattaaacctctactcctctaaatattctatataacaatttcccagttttttctattgtaacaaatgaaagcgtcattttctacaaatatactaaaaaagcaacctatcttaggttgcttaaaggtttaacattagtcattctcaattttttcagcttctgtactgaatttttgtgcgatggcttcaagagctaattcatctgtatctggaagagtgatggcatcatcagaaatctcatcaatatttgcataaaattcaatatgattcttcagattttggagatgaattggtgcatcaccaccgtattcgccatcgaggttaatcatcatacgatcatcacttaaaggctcaatatacagcgagctcgttttgatataggaaattctcttgtcatagatgtgtttaccaccttggagaatttgacgaatgaggtcaaccaattcaaagaggttagctgtcttaaccatgattagagtaaatttaccatcatccagtttagcatctggggcaatcgtttcaaagccaccaactgaattggtcaaggcaacgaaaatcatggaaagaccaccttcaaagacaccctcgtcatgcgtaacacgaacaggaaccttctttacctgtggcaacaactctgcccccttaacaaggtaggccaaataaccaagtactgtctttaagcgactaggtacactataggttagttccgtaaaggaaccagcagccgcaatattgatgaagtatttgtcatcataggcacggccaatatccatctgaagggtctgatttttagcgataaccttggctgcttcaacaggatttcctcttggaatcttcaaggcgcgtgcaaagtcatttgtcgttcccgttggaataaccgccatttgtgggcgttttttaagcggggcaaccccagaaacaacctcattgattgtaccatcgccaccagcagcaataactaagtcaaagcctgctttggccgcacgagtggcctcattttttgctgagttctcatctggtgttgtttgaaaggctgacgcttcaaagccagcaccttccagaatatccaagacctcggcaacattttttttcataatttcttgtccagatgttggattataaattaagcgggcacgtttttgtttcatattgaactcctataaatccagcaaccaagcctcatcttttacttcaattcctaggctttgtgctttttccaacttacttccggcatcactaccagcaactactaaatctgttttcttagagacagaacctgtcaccttagcacccagagcttctagttttgcctttgcttcactacgtttaagatgctccaattttcctgtcaaaacaactgtcttaccagataagatagcatcatctgccaccttttgtccaagataggacaaattaacgccataggattccagttctttcataagaacttgagcctcctccttagcaaaatagcgctggatggacttggcaataacctctcctaaaccatctacagcagcaatagcctcgacatctgcactggctaactcttgtatacttccaaaagcttctagcaactgcttactaactttggcgccaacatgacgaatacccaagccatagagcaatttctctgcagaattttcttttgatgcttgaatggctgcgtaaagtttttcagccgacttttccttgaaaccttccaattgaaggaaatcctgactgttcaagccatagatatcagccacatctttaaccaattcagctttaaagagcttttcaaccactgaaggtcccatacctgcgatgttcatggcatctcgagaggcaaaatgaatcaggccttccttgatctgagcagggcaagaaggattgatacaacgtagggcaacttcatcttcaaaatgtaaaagaccactgccacaagatggacattgagtcggtacttccatcggctcctgtgtcgtacgcttactctctactacacgaagtacagcagggataatatcaccagctttgtagacaattacggtatcaccgatacgaatgtctttttcggcaatgtaatctacattatgaagggtggcccgactaaccgttgtccccgctaattgcactggagtcaaattagcagtcggcgttactacacccgtacgacctacctgccagtccactgagagaagctctgcttccttttcctcagccgggaatttataagcaatggcccaacgtggcgccttaactgtaaaaccgagttcttcttgcatagccaaactattgactttgatgacaacaccatcaatgtcataggccaagtgatcacgatcttctacaacagcttgaataaagtcccaaatctcatccatcgatgatgtgacaatacgtcgtggattaacagagaaaccgagttctgccacttcatttaagacatcattttgtgttagacgctccgttggactagcttcctgataaaggaaagtcgccaaacgacgctctgcaaccactttggtatctaattgacgaagagttcctgctgcagcattacgtggattggcaaattcggcctcaccattttcctggcgttggatgttgatgcgttcaaactcagcccgtggcaggtaacactccccacgcaccgtaatattaagaggttggtccaacttcaaaggaatatctgagatacgcttgacattttcagtgatattctcacctacagaaccatcaccacgtgtcgcacctacctgaagaataccatccacataggtcaacgagatagaaagcccatcgattttgagttcagccatataatcagcattaggaaattcgtccttaaccctcttatcaaaggcatctagctcttctcgtgaaaaagcatcctgcaaactataaagcggatactcatgttgatatttttcaaaaccatcaagtaccagccctcccacacgatgtgttggactatctgcttgaacaagttctggatgttcagcctccaaagctacaagctcacgataaagcttatcatactcggcatctgacactgatggattatcttccgtataatactcttttgcatactggttaagtttaacaaccagctctttcattcgtttttccataggaacattttaacataaaagcagaaaaaaacgcctttacagacgttaatttaggaaacaaaatcaataactttggccaatttcttaatgagaattgcaccaactaagagagaagccaattctcctatagcaacagtgaaccaagttgcccaaaatggtgcctgagtaaccaaggtcaactcagccgcaattgtcaccatgaagaatgagaagtaaaaggcaaagtaaacatgagccttgtcaaaaagtccacctaaaatatcttggttcttaaatcggtcgaagaaataaacacctgaaccgacaaagaccagtgtcgagagacttccgacaaccacatcaatcatgttaaagctaaagaaattagcaatcacacagcccaaagtcacggcaatgatatacttgcgattataaaatcctaaaagattgaacatttctgcaattcggaactggtagggaccatacgaaattaagttaaaaggtggcacaacagtcaagactacataaagagctgccacaatagcaatatgtgttaaatcacgaacagtttgttttttcatttttcctccataatcattatctttttattatctacaaaggataatattcccgtcaaaagagcctggatctcaccaagctctctttatcatctaggaatcatcctcatcttttttgtgttttttgctgtcactaccatctccagaaaagctctgaataatagtaatcacatctcctcttctacttttcagttcaccttgtctaagctcttgataggtcgcattaaagacggcccccaaaatcaaaatcctggccaagaagatgaaccaaagcatgaagacgaaaatcataatggatccaaataacttgatatcaactaatcgactcaaggtacgaatcacataagttccaaacaagttgcttaaatagccaatcaccaaagtcgtaaagatagtccctggcataacaaagcggatttttcgaatcttcacattcggaagcacaaaataaagcaccatcattcccaggaagacaactgcaatactcagaggctggatactatttaaaataaactgagtcatcttggaaccaataggataggtctgtgtaataactctaaggaccgactgaataatcgtagacagcattagtgcaaaggtgagcaggaacaagatgaccagactcatgaaaccaccaacaatatgactaataaagacatcacggtgttctgaagcaccatataccttgttaatcgccttttgaagcgaagacaaggacttaatcattgtccagaatcccgtcaaagaggcaactcccaacaactgtccagaaggtgtcgagaagatatcctgaacaacgttggctgcaggtgcataaaactgcttaggaaggtgctcattcataaacttcaagagatcagtcgtatcaatattcagatagggaaagacatttgccgcaatgacaataagcggaaaaaccgtcaaaatgaggtagtaagccactgcgatagttgaaatatctatctctgcactacgataatgcctaagataaacctgcaaagggcgccattggagtttatccaatagacgggacattaagccttgtcgtttcatattagtaagttctttcttcgccttgagaagtcaaaattactggaccatccttagtgataacaaattggtgctcatattgacaagaaagtccaccgtcaagagttttgtgagcccaacccgtttcaaggtcagtatcgatttcccaagtaccagtgttaatcattggctcgatagtcaaaaccattccttctttaagacggagacctcgtccagccaccccatagtttggcaccattggttcttcgtgcattgttggtccaactccgtgtccaaccaaatcacgaacaacaccgtaaccacgactttcagcgtattcttggatagctgcaccgatatcaccgatacggttaccgactaccgcttgttcaatgccaaggtacatagcctcacgtgttacttccataagttttttaacttcgtcagatggcgttccaatcgcataagcccaacatgagtcagccaaaccgccagaatatgattccgtgtattttttaacctgagcaacattgtcaaaatccaattttgacacatcaaggactgacttatcgataggttctgacaagaccatatcaaccttcaagaggtcaccatctttcaaaatatagtgacgtggaaaggcatgtgccacttcgtcattaaggccacagcatgtcgcataagggtaatccataatgcttccctcaaccccaatctgaaggggaaggacattctcttctttacaacgacgacgcacatactcttccacttcccacatgtctactcctggtttcaagaggtcacgtagaccaatgtgaatactagcaagaaaatcccctgccctatccattgcttcaatttcacgtgctgattttaatgtaatcattgttttctccgttttctttatatcttttatttttagttactaagttttcttaaccacaacgactgatttgcagacggtatgatttccgtgagtaaccataaggtccagatgggctctacgtctggtttcagcgataatacttggtgtaatcgtcaccttgtcatcgatctgagctgcctgaagaaagtaaaacatcatctcttcaatcacaagaccattttgttcctgcttttccatgatacgatagacaacctctttaaccatctctgcaagaacaccctgagtgaggtttccagaattgtcaatcatagtgggctcgacctcaaagctgaaagcatgcttgtcctggtttaggttagctatcatttgatcgctaaaggtgtgcaagttgccacgattattgtcctgaagttcttccaaaacctgacgacgggtgataacacctagatagtgtttttcttcatccacaacaggaatgatatcaaagtcctcaaaaatcatcttttgggccacagttgccagactagtctcaagtcgtgtcaccgtcggcttggtcattattgccttgagcatggtcgtcggttgctgattagacacatctcgcatggtcacaatcccaatcaccttgtcagcctcagacagaataggaaaacgcaccaagttcgtccgtttcaccaaattctgaaaatccctgactgtcatttctggagtcatgtagttgtagtcttctcgtctggtataaacttgagctacagtcttgatgtctgttttgatacggacattcgaaagtgcctggttaatcatggttgccacggtaaaagtatcgtaagttgttaccatgactggaaattgcttcaaacgtgaaagctctttaaccctatcggaaacccgaaagccccccgtcactagaatagcattattgtgttctagggcaagcaattgaatatcctcacggtccccaacaataagaagatctcctttggttagataacgagtgatattctcaatagtcatggctccgatatagaatttactgaagacacgttccagaccttcatgaccggagataacctcagactctgtaatctccgcaatctccgcaaaggtcagcttatcaaggcgaacctggactttcttttcaattcgaactgtcccactccgaggacgtgtctcaaccaaccctcgattttcagcttctttaattgctcgataggcagttccatcagaaacctgtaagtgattcgaaatactacgcacactaacacgcttaccgataggtaaggcctctagataatctagaatttcttgatgtttactcacagttctcctccttctcaaagcggagataatcacgcatggtacgggtgtatcggtctgctcccttaaagcgggacacaagtttaaagccagacttctccgctacacgaatcgatgccttattttccaagtgggcaataagaataatacgatccattcccatagctgtcaaagccaaatttgacagacaagtaactgcctctgtcattaagcctctaccccagtatgaggcattcaaaaaatagccaagctctgcagtccgtttctggacatctatcttttcaaaacgaacgacaccaatcatcttttctaactctttatctacaatagcccatacacctagaggctccttcatgaagtaatgaaccaaaaggcaatctgtttcatgctgtgtttgagtggcaggaaagaaaaattgtagattcttaggatttgatacaatttcgtgtaaatcaaaacgatccaaaaagatgagtggtctaaaagaaaggcgctccgactcaaagaaggcaaaagcacccagactagtccaaatatccatgatagtattataacacagttttagaaatggaaaaaggctcaaccactaggggttgaaccttagacttaatcttcaatcaaacgaatatctgcaccaaggtcagaaagtttctcaatgatatttgaatacccacgaaggataaactcaatattggtaatttcagtttgaccttctgccataagacctgctgtaacaagcgcagcacctgcacgcaaatcactggcttttactggcgcacctgaaagttgcgttggaccattgtaaacaatttgtccaccgagtacctgaatatcagcacccatacgaaccaattcaggaacgtggttcacacgcttctcataaatcgtatcaataatttttcctcgaccacttgctttcagtaacaaaggtgtcatcggttgttgtaaatccgtcgcaaaacctggataaggcgacgtcttaatgtcaacaggttttaaatcaccttgctcttcaacaaagatggcatcttcttcaactgtcatacgaacacccattgcttcaagtttagcgataaaactttcaaggtgttcataaagaacatttttaaccttaattcccttaccgatagccgcggccatggcaatgtaggaacccgcttcaatacggtctggaataacctgatgacgagtgccatgcaagctctctacaccttcaatcgtgatgacttctgtaccagcgccacgaacacgtgcgcccatattgttaagaagagttgctacatcaataatctcaggttcacgcgccgcattctcaatgaccgtacgaccgtcagccttagctgctgccaacatggtattaatcgtcgctccaacactgaccgtatccatgtagatatgagcacccttaatgcgctgactagcatcagtcgcaatacgcatagattcgtcttcataggaaatgctagcacccatcgcttcaaaagccttaaggtgaaggtcaataggacgtggtcccaaatcacaaccaccaggcaaacctactgttgcttgaccgtaacgtccaagcaagctaccgtagaaatagtaagaagcacgaagactgttaatcttaccaaatggcattggcatatccttaacgcctcgtggatcaatttcgagtgtttcgccatcacgcttaacagaaccacccattacttctataatttcaattaggttatcgacgtcgctaattgctgggaccccgtcaagagtaaccactccatcagataaaatgatggctggaatcaatgcaacaactgaatttttagcacctgatactgtaacttctccctgaagtttcttaccaccattgatgataattttacgcatactgttcaatctttcttatactggaatattagcttttacattctaccatagattgaggtgcatgacaaattaagaactctaacaattatcggacaatttcacttgaccatttaaaccagcctttaaaacggatggctccgtctttatctgttcgtaaaattttaatgtggcgttgcttaaaacgttctattgtttcatcatttggatgtttataacgattgttctcaccagctgaaacaagtgcaagggaggggtgcagctggtccaaaaaagcttcagacgaagaaccttttgaaccgtggtgtccagctttgaggacgcttgcccttaaagttggatagctagccatcagttcctcctctccttctttttccaaatcaccggtaaacagaaaactgcttcctaatagctttccgtaaagaactatcgaatcattgttaccaccatcaccaattttattgggataaagaacctgtagattgcttcccatcataggtaagttgtctccagcctttagagtacgaactgggcgttttaaagtcctaagtcgtttcacaaaactaggcttagtcaaagctccttgactgacacagatttccttaatcttaaaccgcttggctacttcttccaaatcaccaatatggtctgtatccgtatgagtcaggaccagatggtcaatttgagacactcccctagcctgtaggtagggaatcaaggttttctccgcattgctcgtctgactagcctcttgccatttttcctttaggccgaaagtcaccttgccacccacatcaatcaggatggtatcgcctttcatactcctcagaaaaatactatctccctgaccaacgtcaaccatagtcacctcattggttaaaggatgtttgacccagaccatcaaaagaccaaaaatcatcaaaaggcaaatcctaaactgaggctttttccaaaaatcaaagagcagaaccaatacagctatcatcaagccaaactgaaacaaactaggtttccctagaatcaaaggctggcctatccaggattgtatccaagtcaaaaaggtctccatccattcaaaaagtgggttgatttgagaaaagattaccaaccctgaaaggacaaagaagaccgtcaagacaggtaagagaaagctatcaaagactatcgaaaacatcgctgtcagaattaaactcaccggttgaaaggtcccataatagtaagttagaaagggcaaaatcccaagactcaataccaagctcgtacagattgactttttaagagatgacatctcatcaaaatcaaacaaacacaacaaaaaggcataggaacaacttaaaacacctcccactgtcaaaagaaaatgaggtaaaaagagaaacattagaagcaaggttattcccatattgtccagttttttaataccaaactcagccaacaaactttgaatcaaggaacgtaggacagaagctgtccaacctgtcattaagccatagcataaggaaaaaggcagcaagataataaatagataatctttaggaaggcccaagcgtaggagtccgtagcgaaaccatcccagaaaaaagcccacttgcatccccgaaagtgcgaatagatgaataatacctaagcttgtgtaaagctgactttgctcatcaaactccttgtccaaatacccaaagagcagacctgtcatatagtgtctcataggattaggaaaatgcgtctgaatatgaaccaaagccctcctcctcagttgatggaaaaaagctaggggagatgtgtttttttgagacaccacatgatccaagcgctcaatctgagcgattcgataaatacctttactggctagataagactgataattaaacccttgaaaattacgttgaccagttgctggggttaacgtaattttcccttttaatactagcgtttgactagtagtcttgaaaaaatgctgctccttctcagatttgagtcggtaaaaaacctgataggtttgtccctttgcctttccaatagctgataattgctcaccattaaccgatagcgtatcagcaaccagagtcacctgattgatttcagcaggagcttgtttatcttgtatgctagctctatgatgcaagaataaaaagtagaccaaaaagaaactacctacaagtcccaccaactttagggctgtcttattcttccaatgatgcttcaaaaaacagaccatcagaaagacaaaagtcccaatagcataaacattagtggcaaaaatcgtaaaataaagagcagctattaaaagagtcaaggaaaaaagattgatgggagcttttttaagccacatagagggactctctgattttatctaaagttttatcaccaatccctgagacatttttcaagtcatctacggattgaaaacctccatgactttcacgataggcaatgatatcctcagcacgcttagcgccaattccagaaatggtttgtaactcctctgaagtcgctgtgtttaagttgattttgccatccttagcactagtttgccctcctttgtcagagacctgaccagttcctgattgaccaagaacagaaaggttttcatccttagttgccacatagataacctcttcgtctgacaggcttgcagctaaattaacactcttagcatccgcatcctcagtcattcccccagcagctttgatggcatcagtcaccctagcgcttgcttttaaagtataaacacccggattagccacagcccccttaacatctaccgttacttttgacttctccttttcacttccttcagtctttgactgggaagacgcctcagaaagagactgtgaactttgtttggaggaggaggttgacaaagctgtcacatctgtataagacgtctccgcctccatgctgttgccggcaccacaagtcatccatagaaagaagcaaaaaatcaccatcagtacagcgatgacactcacaaacagacgattatctttgacataggctagaatcttttccttcacgctattctccttaattgatatattttctttcttattcgtaaaaaattaaaaaaatatatcaaaaagtaaaaaactccatcagatctatgtctgacagagttatttgcttatttctgcgtttctttggcacggtgtttttcagggttccaaacaaagctagctacatatgagaaagccatggtcaaaagcactgcaatgatagccacaagagcgagaggtacacggtaaatatatgtcaatgggtttggttttttgcctgtttgatagctcaaagcttcttcatctagacgagcaaattcagactggatacgacgagcaacctcttgaatattttcatcattcaaacgcttcaaatctgaaatatcaataggattaccatagttcatatccacacgttcacccgtcaagagccccttgagctcacgaggtccttgatagacaactggcataatcttaaccttggccatcttagcgataaccgcaaccccacccttaacatcagatgaatggcggctaccacttgggaacataatcaaactacggttactcttcttaagcatgttaacagggtacttgatagcttcttgaccaggattttcacggtcaattgggaaggctccgcacatacggatccaccaaccaaagatacgactcttgaagagttctttcttagccatgaaaataaactgcttaggacgagctgaaaaagccatataaacagggtcccaccaagttcggtgcggagcaaccaagatatagttttcgtccttgttcaataatttatcgcaattgtggtaatgggcattcccattgataatccatagaaggaagacaacaagcccacgtaaataagcgtaaaacacgtttttacctctttttctacaagttttttctattataccaaaaaaaggagcgcttttttcatcgaatttctatgtaaactattgaaaatggtgtggcactttctaatagtttgagctataatgtaactatgaaaaaaagttttgagattatagggaaaaatcgaaaggcacttaatctttgccttattattgcaaacttggctgttctggctatcctaggctttgtcctattccagcaccaaaactctaaggttaatcgtatggttaagacaccaaaaaacgaacaagtgtctaagggttcaagtagctcttcaaaagaagctaaaaaagaagctaaaaaagaggataaaacacaactcaaaaaaggaagcaaccacagcattgaggcgtctgactacgcctatgatgtcactgccgttaataacactatccgaggaaaatcagatgatgttaagggtaaggtagtctttttaacctttgatgatgggattgatcccactttgacaccacaagtcatggatatcctgaaagagtatggcgttcacgcaaccttcttccacatcggctataccatcacccctgaaaatggggacatcctcaaacgccaaattactgaaggacatgccattgccaaccacagtcttagccataatttcaatctgctttatcctgggcgcgttccaaatcaaagtcaaattgtttctgaggttaaccaaaccatggctaatttccaagctatcttaggcaaggacttcaagacaagaattttccgttatcctggtggtcatatgtcatggcaaggtctagaaagtactgaccatgctctagccaaggaagatatccagtggattgactggaacatgctctgtggagatgcagaaccactctctgttcgtccaaccacatctgaaagcatgatggcttatatggacggttcacagaaatatttccctgaaactactgttaaagttgtactaatgcacgatacagctggtaaggagctgactgttcagacccttccacaaattatcgaatatttcaaaaatcaaggatataccttcggtgtcctagagtaatcactcgcaacagttcctttgggagctgttttttgttacaataaaaactatgacaaatccaattttaaaagacggagaacgcattgaccaactcttctccacagatgtgaaaatcattcaaaataaggaggtcttcagctactctattgatagcgtcctcctctctcggtttccaaaaattccaaagaagggattaatcgtcgacctctgttcgggaaatggtgccgttggcctctttgccagcacacgcactgaggcaccgattaccttagttgagttgcaagaacgcttggctgatatggccaagcgttccgtaactcttaatcaactagagaatcaagtgactgttgtcaatgacgacctaaaaaatttgcttgaccatgccccacgatctcaggtggaccttatcctctgtaaccctccctactttaaggcaacagaaacgtctaagaaaaatctgtcagagcactacctcttggcacgccacgaaattacgaccaatttagaagaaattttccagatcgctcgtcatgccctcaaatctaatggacgcattgctatggtacatcgccctgaccgctttttggatatcattgacaccatgcgccagtacaatctagcgcctaaacgcatccagtttatataccctaagatgggacgtgaggcaaatatgctcctgattgaagccattaaagacggctcgacagatggcttgaaaatccttccacctctctttgtgcacaaggaaaatggtgactataccgacgaaatttatgagatttactttggaaaaaagactgagggtgagtcctaaacgatgacagaaaaggatagcaaggcttacatgtatgtggttgagtgtgccgatggcaccctctatacaggctacaccacagacgtcgaacgccgcctcaaaacccataactcaggcaaaggtgctaagtataccagagctcgcctaccagttaaactcctctactcagaagtcttcgccagcaagcctgaagccatgagcgccgaagcactctttaagaaaaaaagccgagagaaaaaactggcctatatcaaagaacacacggaaaaataaccgtgtgttttttggtcttgaattatcaaattaagtgcatactttcctcttataagacttcataagatgttctccagttatgatattttcgtgccttattattaagtttgttctcccaaagctgaatgatctgattatcaaccaatgttagatcacttccatttggaaaatactctcatagtagtacaactcacgcacatgaataattctacatgctctaaatagctttaaaatcagtagtattactccaaatttagtaaaaaaaaagacaccctgcaaggtgtcctgaattatatccacagtaaatgccacaatatagataaactcatctttaggtataaataatcttacaaaatgcttctatgctatcttattctctaattaaacctactttgataaattaaattaaacaaccactgaagattgattaatggttttggttgagcatcaatcacaggttgaacggtctctctaatttcttttaggacttttcgttgattatacttaatattgtgataatggtcatcaaaagcatgttggagagtaaaattacgattaaaaatataactttcacctgagtccgggtaaaagactagagtaccatctgaaaaacctaatacagacgattctgttcctttttctctagttatagcgtacgtcccgtcctcatcatagctaataccatctatttccggtgtataaatccagccattattctccatcagcataacaatgtccggctctgtcccctccttatgaggaatatgctgagcataataaacagagtggtattttaaattaaaaaaactaaataggctcattcctaaaattgtaaccagccctataaatagtcctacaaaaatccctaaaatattgctttttttcattgtcatcttctctttcctcttctacgaccaaacaatctcttgactggattaacaactaaacgtttcacagtatttacgacaggtcttacaatataacgttttgttgcttttgcaattggtctaacaactttttgataaattggtctaacaattggtttcacaacacggttgtaaacaggtttaactatcttattataaactggttttataatgttcctattgacaaacccagatactggtttaacgatacgattatagactggcttaattatattgttataaacaaccttaccaataggtttaaccacggtattattaacaacctgtacaattggcttagcaacagtcctaatactattatatactggttttgcgattttattaatagtaaaattagctactggtttgatgaagtttttgttaattttagaaacggtttgtatggtattattgcttaatctaaccaaatttcttctaataggagcagtaaggtttttctcgaagaattttagcggttgtttgataaaggtaatagcttgagactttaatggctcccaaatgtctgttcgaaaagttccaagcgggtttttaaacaacctttctacaaaagctttaatgtcttttagttcttttaatacaatcaatgctagaccagataaacttgcaacgcttccaattaataagagactcatatatctatctgtaggtgtatttttcgactgctcttctaaggcctgataataatattcttggcgtttttgttccaagttatctgtactgtaatatttttcaatggcttgatcaagatccatatctttaaactcactatgatatctcaagatataagcatcaatatccgtgagaaaatcctttttatcgatagtcgttagcaagtcccccactaaggaattattttggaagagaatctcttcagaagataaaccagacttattatacggggaaagccctgcaaataatttaaccatctctttaaaaaatccacttctataagaagtagcaataggagcagccagatgcggaaaatctattgtgtaagatttcttcatatgtgtttttcgtaataaatcataaacgtgaggagttaaaaatttcgatgcttcgccaaagtcatttgtcattgattgtaacttatctttttcgtaagaaactcgagcgatggcatttgcaattgtatgatttattttatcatgatcgttaccatattttttccgagcttcatcaccaaccgacttaatataggtaagaaaatcctttttttgatccattgtcatattggtattgactaagaatggatctttctccttctcattttttgatggtttttcttgactcttttcttgactcttaggtatagtttttggaattggtaaacctgggctattgtattgttctattcctaaatgattgccgtaatgagaaaaagtcggcgttggaacatagctttttgaagaatggtattgcactctagtattagtatcatatgattggctagcactatttggtggcaccaaaggatgaccaactaaagcgagctgtgactgagattctttacctttattcttatttatcagaacttgatgtataggttgttgaattttcttataagtaaaaacctttgtaagtggttggttaaccaaaacttcaaatctttctggcgttctatagccactaatttcttttggtgtatgtgtcaccttttggccatcaagtgcaatatatttcacactctcagataagactttgccattttcatcttggaattttaaagtaactggaaattctttctgataagcaaactgaatccttgtcctaccccagctttctgagaatttctttacatcaattaagcgatagtctttaatacttatagaatcaaccttataagattcatcatcaaagcctttataaaattctgtcttcttcagttctttgccatgattgtctacatactgaactataatggacctagaaatgcgagatttgatatttgcttgtaaactgcttccaaaaatgtcatatcgaacagccatcggataggaataagaatcatttactctttctggtgctggcgaataaaaggtataatcaaaatttgaaataaaacctgcacctaaatagccacccttcggcaaatccttagacccattaaggcctactacacccggtgttgtatcataaataatgccatctttttttacaagattagactccgttggaataatttcaaccaaatttgcaagattggtctgtaccccttgggctgcatcaatatctgttgatatgaaacttactaccacaggctgttctattttcgttccatgcttgacaatttgataatggagagcaagattgctcgcattattatataagataacaattgaatttcctgttgcacccaagattgactgctctccagcaaatccaagtcctttaggacgattatcattgtatccagagttagaggcccattcatctttatcactttctagaacagtccacagcaagtctaactctatccctgataaagtcttacctatataattgatacgaccgctatctcctacattcgtgctataagctataacaggtgtagagggtgtattagaagccccaaacctctcaggatcatttatgataccattttcttttccctgtataatttctgtatatgtcttgtctgaccaatgaagtccctcttctgttaaaaagttatcatcagttaagttatttccttcaagattgatttcaacatccttaaagaaatcagtgcctgtaactgatgggtctacacctccagaaatttcaacattagtaatagtcggttcggtatttccattcttttcgtcttgcttcaaacttgaaagtgcattcgcattatttcctataattatctcatgtgtagctgtttccgtagtatcacttacattagtatctgtacttgttgttgaactttcatcagctttaatattataggagttcaaagctataacagaagcaaaaagaaatatcccatatttaacaaataatttcacaacatctccttttaattttattgaatattagtattatcgaaaaatttaatccttgtcaagagataaaacctattcgaataaatttaaaagatgtcctataaagtcaatcgaaatcaatgatttgatgagataaaactttcgctaaaaatagaaattacactaaaatatacttcaattaaggaaaatattgtcaaataaacaacatcttttgttctacttaaaattgtgctgtttttgattcgataaattgcaagaataagtgcaatttattatgtacttatattgtatattcaaggtataggaaaacactctattttcatagagcgttttcattgcttatttatcacccttgttacggataacaaagccatttttcttttcgcttgaggtacggtgtgggcgtttgttgccatggttttcgaagtcacggctattcttcttagacttgcgtttgaagtcacgacgtccgccgccgtctcggtcatcgcggttacggtcgccacggtatccaccacgacggttgttatcgcgaccgcggttgccacggccacctttgcctcctttaccgccaaagccaccacctgatggtttgaatggcaatggtttttcacgcgcaatttccacttctggcattgtctctggatcttgaacggtcaagctcaagatgtaaagggccaattcttcaggtgtgaattcttgagccaatttaaccgcatcgcccttgaacttgtcaaagttagaacggatagcttcatccgcaaagtcacgttcgattttcttaagggcaactttcttcttagcctggaaggcttcttgagctgttggtggcttaaggcctttcatgcgtttcttggtcaaattttcgatgattcccaagtaacccatttcgtttggtgctacgaaagtaatagattgacctgattggcctgcacgtcctgtacgtccaatacggtgaacgtagctttctggatcttgtggaatatcgtagttgtagacgtgagtgacacctgaaatgtcaagaccacgcgctgcaacgtctgtcgcaaccaagatatcgatttggtcgttcttgaagtcacggataacacgaagacgtttgttttgatcaaggtcaccgtggataccttctgcacggaaaccacgaagtttcaaaccacgtgtcaactcatccacacgacgtttggtacgaccaaagacaattgacaattctggttggtcaacgtccataaggcgagtcatggtatcaaacttctcttgttccttcacccggataaagtattggtcaacgttaacattggtcaattctttagccttgatcttcacatgctcagggtctttcatgaactgcacaccaattcgtttgatggcatcaggcatagttgctgagaaaaggagagtttgacgttcttctggcactcggctaatgatagcttcaatgtcttcaaggaagcccatgttaagcatttcatccgcttcatccaaaatcaaagtctcgatgttattgagtttaagagccttacgtttgataaggtcaaggagacgacctggtgtccctacaacgatgtgggcacctgaacggagggccttgatttgtttttcaatgctagaaccaccgtagactgagcgaactttaacgcctttgtcacgaccaaaacggaaaagctcttcttgagattgcactgccaactcacgtgttggggcaataacaagggcttggattgtattttcttctgtacgaattttatctagggtaggcaaaccaaaggcagctgttttaccagtaccagtttgggcctgaccgataacatccttaccttcaagagcgagtggaattgtcaactcttggataggtgatggtttttcaaaaccggcagctacaacagctgattggatgtcttctgataggtttaaatctgtaaatttcaaagtattcttctttctatttgaaggcggtgcgaagccaccttatgagacttggttgtgtagtagattaactacctgtatttaatagtcgtttattttaacaactcatctagtctatcatatttagaaataaaaagacagaaaataacgttttaaaacagccttcaatttgagaagacggtttcactcactaattattatttatggaccaaccaacgaaggtagcgggccaagaccaaacaaagaattacactaccgataatgatgaaaatccaggccggactgacagtcataaacggtaaaggaacattcatcccaaagaaaccggtaatgacggcgagcactcccaagagtacctcaataatagtcaaattactcaagttgttgttcagattattgtttaggatattattataagaacctgatagttgctgtaagaccttagaaatgaggtccgtcatggctactaactgtctagcttcaatcatagcatcatcaaactgttctttttcgacctcgttgagacgacgataaatggcgtgtcccttgatgtgctccaaaaggagacggttttgtgtagcggcagccaccaaatagaccatgcctgtttccaaatctgaaaggtcgtaaagattcttacttgtcgtagtctgccttagacgtcgactaacctcatctttttgctgatccaaacgttcaatgacgggatagtaggcatttgaaatcatctcaagtcctgcaaagagcaatttataaatggacaaatcctcatggttatccacatagtcttgcattttgttaatcacataagcattatcctcgttactaatggtcaccaaacgcgtatcttgtacaataaaggtcagaggaatggtttcatagtattccttgtccttttcaagagccaggacattatagataaaggtaattgtcccattctcacggttgtagtccatgtgggctcgttcatttttatccaaggcatactctatggtttcctgatcaatatcatacttggtataaaggtaggactgctcagaaataatatctgagtcaatattaatccagtgacgcttataacccagttctttttcaataaacatttttcttcctcattactttagcactgctgctgccaaagcttgttgaatttcaaagacattattatcactcttaaattgaaggacctctgcgggctccaatgctgatgaaatccaaatcttaagttcagcatctaggtcaaagtgccctgaactttctacagtaaaacgagaaatcgagtgataagggatagacttgtaggaagtcttcttccctgtaacaccttgcttatcgactaaaatcaagcgcttctctgtaaagacaatcaagtcacgaacaaggacataggctaactccacttgttcacctggaattaagatgccctccaattggcgctcaactttatcattatcttttttagatgcgttaccaagcagtcctgaaaaaagtcccatagttgtttctccttttttattgtaaagataatccttgctttaactataccacaattttaggatttcagacacttgcagaaatgggtttctagtagtacaattaaagagtcacaagaggagcaattgctgagaatggctagcttgattttttcgtcaagacctgcctaaactcttaccacctgatcaggttaggacctgcgtagggatgtgtctcaaaatagattgaaatagaggaacttctatgacgtcgttttgatgtggcaaaaaacagccaatcaagacgattggtataggaggtttttttatgtcgaaaacgaatattcgaccaatgattgaggttgccctttttgcaaccattgcttatatcctggacctagttacccagcccatgtcactaggcccttggatttccctttcctttaagatggtacctatctttctcctcagttttcgctggggcttaaaagctggtgctatgggcggtcttatctggggactacttcaagtggtgacaggacaggcagccggtggttggctaaccttaacacaaggttttctggaatattttgtcgcctttagtctgattggtatcagtggtgtggtcaaaccagcccttgataaagccattaaacaaggcaatagagtcaagtctctgatggtgattactgaggggattctgcttggtagttttgctcgttacctcattcactttatagccggtgtcatcttttggggaagctatgcccctaaaggacaaagcctttttctctattcatttattgtcaatagctcatccttccttggagaaacattggccagcctcatcgttttcttcgccctacaacgattcctaggcaggttactcaatacggaaaaataaaagaaaccataggacagtcttaagtggcagtcctatggtttttcttgtttatataaaaaacagcaattattgcctattcacagtaataacctcacttttgttttactattttttatgttaagatacaaaaagatatatgttcccatatatgcaaactggaggtttcccatgcaaaaatttggagaaatttttaaaaaatttcgcgaatcaagagggatacgattaaaagatgtcgcaaaagctggtatctcgacatctcaactgtctcgttttgaaaaaggtcagacagacttaaccattacaaagtttatgttgatattggacgagattaatatgcctattgacgaattcatgtatgctgtccatgattttcatcgtgatgaactgaatgaactattagcaaagattcagttttttgtatcaactcatgatattaatggattaaagaaactacttaattcccaactaaaatcagaacataaacgagaaaaatttcatcacattaatactattttattaaaaattcgcttgcaggatttatcgggagaaagctattatacacagcaggacctaaccgatttaaccgattatctatttagtgttgagtactggggttattatgaattattaatttttgcaaataccttagatgtgttgaaccatgagactcttatggttttggcaaaggagatgtctagaaggtctgatttttacaaagagattcctaataatcgacgcatgatatcaaccatgttattaaatgtttatattacatgtatagaaagaggagagctcattgatgcactgtatttcgaaaaacaattaaaccaatgcttttttatcgagactgaaatctatgaacgattggtttttcaatatgcacaaaattattatcaatataaaaaagaaggaagcaatcagtctattatcgaaatgaagaaatgtattggtgccatgaaattggcagggagcgagcatattgcaaagacttatgaagcacatttgaaaaaattgatagaggaaaatagttagcaagcatatatgggaaattattaaataagattattattcttgtaaaattatttaaaaatatgtgtgaatccaatttcatttccagatttggtaaccaatatggagaaacgatatgtctaaatcctttctgaaattacttatctctcagttatttgctaacttagctgacatttttctcagggtatctctcattgcaaatatctacgtcattacaaaatccgttattgcaacctcaatggttccgattctaatcggattgtcagctttcgtggcaagccttctggtgccattagtaactaaaaaactagccttaaatagagtgctttcattcactcaatgtggaaagacttttttattagcaatactccttgtaatgctcattaaggctcaatttgttccagccttaggaatgtatatctttgttgtcgctatttctatcttagatggctttgcgtcgcccgtatcttatgccatgattcctagatatgccacaaatttgggaaaggcaaatgctgccttatcaatgagtggtgagggagtacaattgattggttggggactaggcggtctcttatatacttcgcttggtctttttcccacactgttgatagtcttactcctttatctcctctccacttttgtgatgctctttcttcctcaggctaaaatagagcagttagaagcggagacaaatattgatactctagtaaaaggatggaagttagttgcaaaaaatcctaaattaaagttatttgttcaagcaaatttattagaggacttctccaatacaatctgggtatcgtctgtaatccttgtttttgtaaccgaggtgttaaaacaaactgaaagttactggggctactcaaatacagcctattcccttggtatcattttaggtggaataattgtctacaaactatccgaaaagtttttagcgcataagtggaaaagtattctcttttcactcttagcaatggcgaccatcacagccagtatcctctttttctcaaatacacaaacatttttaattttctccagtttaatcggcttcttttctcagttaaaagaagtacctgaaagtgtctttcttcaggaaactgtcgatgaaaatcagttagtacatgtttattctgtatttgaagtcatttcaacccttgctttttcagttttcgtctttctgatgagttctattactgaaaaatttggaattacaacaagtttctggctatcaacaatttgcatacttttagaagctggcttgatttatcataatcgtaattatctaaagtaattaatcataggtatacttgataactattaggtttataaaaaaaataggactatctgattagatagtcctatatttttttgtgttgttttagagacgtgacgtagttagtgagacggctagttagctacaagataggggctagcgtcaaaagatgaacgatttacttaaactatacatagtattatgacatgagaaaaaggaaacgatacttttccgttttcgagttagtaagggacttagccacggtcacatagaacacttcataaataacatcattaagatgttacgacacgaagtcagacgaatcgatattattcgtctgacgtagttagtgagacggctagctagacacaagatagtggctagcgtcaaaagatgaacgatttacataaactatacatagcattacgacatgagaaaacggaaacgattattttccgttttcgagttagtaagggacttagccactgtcccataggacgtggcgtagattgcttaggctatgaaatagccaagcaatcttagtacattacatcttctcttccaatgttacatcaggatatttatccgcaaaccaacggagggcaaagtcattttcaaagaggaagactggttggtcaaagcggtctttggccaagatatttcggcttgatgacatgcgttcatcgaggtcctcaggttgaatccaacgcacagtctttttacccattggtgtcataacgacttcggcattgtattcattttccatacggtgtttgaagacttcaaactgaagttgaccaacggcaccaagcatgtattcgcctgtttggtagttggtgtagagctggatggctccttcttgcaccaattgttcgattcctttgtggaaggacttctgtttcatgacgtttttagcagaaactttcatgaacaactcaggcgtaaaggttggtagtggctcaaattcaaatttgtttttacctacagtaagggtatcaccaacttggtaagttcctgtatcgtaaaccccgataatatctccagcaacggcattttcgacattttcacgagattcggccatgaactgagtgacgttagagagcttagctcctttacctgtgcgggttagattaacactcataccacgctcaaattcaccagaaacgatacgaacaaaggcaatacggtcacggtgacgtgggtccatattggcttggattttgaaaacaaaaccagagaaatccttgttgagaggatcaatctcgtcaccatccactgtcttgtgaccatgtggttctggtgcaaatttgaggaaggtatcgaggaaggtttgaaccccaaagttagtaagggcagaaccgaagaagaccggtgtcaattcaccagctaaaatagcttcttctgagaattcattacccgcttctgtcaagagttcaatatcttctttagcttgctcatagaatgggttgttggcaaaaagagtatccccatcttcaatcttggcaaagcgctcatcacctttgtaaagctccaagcgttcgttataaaggtcgtaaagtccttcgaaagctttacccataccgataggccagttcattgggtaactggcaataccaagcacttcttccaactcttccaagaggtcaagtggctcacgtccatcacggtccaatttgttcatgaaggtgaagacaggaatcccacggtgtttgacaacttcgaaaagttttttggtttgggcctcgatacctttggctgagtcaacaaccatgacggcagcatcaaccgccataagggtacggtaggtatcttctgagaagtcctcgtgccctggggtatcaaggatattgacacgtttacccgcatagtcaaactgcatcacagatgaggttactgagataccacgttgtttctcaatatccatccagtctgatttggcaaaatttccggttttcttaccttttacggtaccagcttcacggatttcacccccaaagtaaagcaattgttcagtgattgttgttttaccggcatcggggtgagagatgatggcaaaagtacggcgttttttgatttcgtcttgaatgctcatagttttctttcttctttaaaaattatctttttgttacttttccttagtggtatggatgtcagcagcttctttgtaaatctcaaaaatcccatgtcccagagctactaatggcaataggttttttaccagaacgaaaagcaagatcgttgtagctcttctttcagaaaatttctgtcttttgaaagctacatttgttgtcgaggcttgcgataattctcgcaggcacagctcttttattatatccaaattacagtgtgaaagcaattctgaaagcgttttgtgttagaataaaactagaataaaacaaataaattgacaaagcacgctatcaactttctgatagcgtgtttcttaatttatttaatattactcttcaaaatgctccagaccttttttcatgatgatcatgagaataatcagagctcctgaaacagcaaggtatttgacaagtaagggagttcccataataaatggtgtgtgtttaagcatgccatagtttccaccgatggtctgattaactattaccaaagctagatttagtaataaggtagccaccacaatcagccgcttgctgatgggatgagttttataactattaaagatgacattgaggctattgaccagtagggcatagtggccaattaggaaagaaaagcctgtgatatgtggaaactcatagggatcaaatactggataaatcaatgcacagtaggtcccgatgactcccataatagcgaaatagctctttattctactatttttcaggaggagaacagcaaacatggccatgcggcaatggtaaaggggcagactaatgtaaagtggaaagccctgccagaggtaccaagtatagagggcaaagagttgaatggcttggatagtgagaaaggtccaacgccatatcttattcttataccaacgccaactcaagtaactcagaagtagcatcgccaaaagcatgagcaaataatagggcaaaggtatctgaggtggatgagtttgggtggttgtcaaaaaattcttcattctcttctcctgctgaaattactatgcctgctattatatcaaatttcagggtaaagcaaaaacctgcttggagagcaggttagagaacttaattcttagcttgtaattcttccacgaccttagctaggttcatagagttagagcccttgagcaagatttgatcgtgctcgcctaggctttctttgatttgtttgaccatagcgtcaaattggtcttcgtcagctgttttcttgaaataataaacatgaccaagtggaaacatttggctagcaagttgcgacaattctgcaatatcctcaccgtagaaaatcaccgtatcaatagcatctggtgtcaggcttagaatcatctgtgtgtgaagttgcacggactgttcaccgagttctttcatatcggctaagacagcgattttcttacctccttcattcttaggaatggctgagaaggtctccaaaatgagcttcatggctgttggattggcattgtagacatctgaaaggatgtcggcaccgttagctgcttttttccattcagtacggttctttgtaagctgcaagttagcaagagctgagaggatattttcctcagttacacccaagtgttttgcgacataggcagcaaccatggcatttgtggcattatattttccagtaactggcaaggtaacttgtccgtctaggaaattcgttgagaaggtgaggtgatccttgaattctgttaactcagagaccgtaagctccgcaccatccccaaagcgtacaacttcaagattgcttggcaagaatggatcgacgataggatcactaggtacaagcaagagactagcatcaggcataccgtcttgcatttgcattttaccttgagcaatcttgtcacgactaccgaagaattccaagtgagcctctccgattaaggtaacaacagctgtttttggcttcgccaaggttgacaagaggtgaatgtctcccatgtggtcttgccccatctcaaggacgattttctccgtatcatcaggcatgtggagggctgtataaggaagaccaatctcattgttgtaattaccttgggttttgtaagtacgataggttgtggccaagatatcatgaatcatgtccttggtcgttgtcttaccgttagaaccagtcaccgcaataacgtcaacaccggtcttttcaagatagtaggcagctagtttttggaaggcttcaagagcatcatcgactagaatgtgagcttgatcagccgataattctttttctgtgaatgtcgctagagcaccattgtcaaaggctgtttggataaaatcatgtccatcacgcgcacctttgagcggcaaaaagaggtcgcccgctgtaatcttacggctatcaaactcaatctggttaatggcaacatcttcataggctgtgacatcatttttagcgccaacaaccttggcaatttcatggagtgtcagtttcatcttaaaatcctctgttttatttttacaagtctggcaagaaataagattttcttgcccgcaatcactcccaattatatcacaaatcaggctagcttttgcttgggagatgaatttgttacaatggttgatgaaaggattaggtatgacaaagaaaaaattaatcaacctctctaaaggagaggaaaatataaatagcgactgccaaagtattgaagaacctaaaggatggcggtttgattggagaaagatcatcccactagagccaacatctgaattgattatcttagtgctgcttgcactgctgtatggtggtttttattattacgatcattataccgtcaacaaagataacatttatggtctctggcaatctgatcatcataagttagcgatttcctataagcatattcgcaagcgaggaaatatcgactggcaagtcgtacaggatggtaagtatattatctatgctgctagaactcgcccggtcaagcggcttaatgacgggactcttcacatggagctctacactgtggaaggctacctgacagacctccccaccaaggacggcttcagctatatggatttctatcttcgcaaaaataattatcttacctatgacggtgagtcctacaagcgtatcaattctggaaacaagactattacttggaaagatggttctaccagcccttatggtgaacggaaaaccactatagatgaggtttttgaagccttctatttgatacttatggggatttgctcatttcttatcattatagaggctcggcaaaagaggagagaaaaactcaatgagacaccaaacaaacagaaaatacgctgaccgaaagaaactcaatcgaaagtatcagtcacgaaaagcatatcgaaaagaacaaaaatgtaaaacgggatggcgagcacgctgggataaatttacagaccgtttagctaacattttggggataggtttcctaatcatcttacctatattcattatctatgttattttctttgatcataacgtatataaagacagtatctatggtctttggcaatctgaaagccatcagcttgccatatcctacgaaggaggttacaagtcaggtaagcgcaattgggagattgttcaggatggaaatgtcctcatcaaaaatgcacgcattgatgagattaaacgctttaatgacggtaccctctacattgaagtttatgccgaggagcgcctgctttcaaacctccccactaagaacggctacaactatttgaatatgtatgtccgtaaagacaattacttgacctatgatggcgaatcctacaaacggattgatgatgaaaacaagagcattacctggaaagatggttcaaaatccctttatggtcaacgaataaccttgtttgatcgtctgaaacctcatatcgtatttggaattattggttctatgtttttgtatgtcatttttgtcgattggagaataaaaagaaatctaaaaaggaaaaataggctaaatgaggcatcaactaaagagaaaatacgctgaccgacagaaaattaatataagtgaccattcacaaaatgaatatcgaagaacacaaaagtacaaaactggatggcgagcacgttggggtaaattcaaaaaccgtttagtcaagattttgagtatttgttttctaatcatgatacctatagtcaacatctatattagattcttttatgatggtatcagtgaaaatagtatctacgggctatggcagtctgaaaaccacaagcttgctatttcctataacgaaggaggaagaagtcgtaagtacgattgggagattgtacaagatggaaaactccttatcaaaaatgctcgaactcagaaaattaaaggtcttaaagatggaaccatctacattgaagtttacgccaaggaaagtctgttttcagaccttcccacaaagcacggctataactatttgaatatgtatgtacggaaggatcattatttgacttataatgatgagtcctacaaaaggattgatgatagggacaaaaccattacttggaaagatggctctacctcggtctatggtgaacgcaaaactttttttgattatattgactcttttcttttttggggaatggtgggaaccgctttcttgtcaattattgtcattgggtggagaaacataaaaagtaaaaaggtgagaaaaaaatcaccctaaaacaagaaaaaccactcctgcttctagctgagctagatagccacgaggtggttttacttgttttattcttgttaagcaagatttccccttagagaggaattagccttatttcacttcgccaccttcaaccacgaggtcatcagctttagctgcatcaccgtaagttgggtgaagtgttttttcataatctttgtggaagaaattctcttcgccaagtttcttaatgtctttattgataaagtcaaggagttctttgttacctttttgaacggctggggcaatagtatctgggttaccaagcgatgtgattccaacttcgtaacctttattttctagagcccaagcaagaacttctgtattatctgttgagaaggcatcgccacgaccatcaaggagggcttggtaagcgtcgctatattggtcatacttttgcaatttgatatttgggtagttcttttcaaagtaagtttcagcagttgtccccttagtaacaatcaaagtcttaccttcaagctctttaacgtccttaatgaccttatctttaggtgataccacaccgattgagactttcatataaggaagagcgaagtccacttgtttcttacgttcatcagttactgtgaagttggcaagcgtaatatctaccttgtttgaaatcaagaattctgcacggttggccgcatctactgagacgtatttaggtttaacacccaagtctttagccaaacggttaccaagttcaatatcgtaaccttggtaagcacccttgttatctacataaccgaaaggtttcttgtccgcaaaaacggcgatacggagttcaccactcttcttaatttcttcaatagtacgtgctttggctgttgatttaccagagctactgttacttgagcaagcagtcactgccaccaaggcaaagacgagggctaatagggcaaaaattttctttgttaatttcataaatatctcctaaaatattatattttttattaaaaacaatgggttacaaataggcaccaaactggctgaagtcaaagacattgagaaactcttgagctcgctgtgtctttggatgattgaagaattcttcagcagtaccttcctcagcgatgacacccttatccataaagataatacggtcagcgatggcacgcgcaaactgaagctcatgggttacaatcaacatggtacgcccttcttgagcgaggtcattgatcaattccaaaacttcacgaaccatctcagggtcaagcgacgccgtcacttcgtcgaagagaataacttcaggatgcatgagcagtgaacggacaatggctacacgttgcttttgaccacccgacagttgtcgcgcaaagctatgcttcttgtccaaaagtcccacacggtccaaaagtttctcagcctccgcaataacctcttccttgttacgcccttgagctttgaccggtcccaaaatcagattttgcaggatgtccaaatgcgggaagaggtcataactttgaaagaccattccgattttctgacgaatcaagtgaaaatccttcttgctactagtgatagacttgccatccaggagaatatcccctccttgaatagtctccaagccattgatacaacgtagcaaggtcgatttcccacaacctgaggaacccaggataacaacgacttcaccttgtttaacatccaaggagatgcctttgagaatctgattgtccccaaaggactttttcaaatccttgatttgtaaaatgctttctgtcatcttaattcctccaacgattttcaagataagtagacagcttagatactgggtaacaaatggcaaaataaagaatcaaaatcgtgccataaatccagaaagaagctgttggaatagtcaggcggttactatcaataatctgctgaccaaccttggtcacctctactacgccaatcaaaaccaccaaggatgtggtcttaatcatacgtgtcaccaggttaatagcctgaggcaacaagcgacgcaagacttgtgggataatcacataggtatagagttggccattggtcaagccaagggcccttccgctctcaaactggtgtctaggtagtgacgtgattgacccacgcaccaaatcacccatctcagccgttccccatagggtaaagacgataatagccgatagctcgcctgagatattgatgttaaaattcctagccagaccaaaataaacaatgaagagcaagactaactggggcatgatacgaataaattccagataaatacgtgacaaaaaacgtacaatcttagatttagaagtcatgacaattccaaaaagggttcctaataaaagggacagaagcaccgaaacgatggaaatcccaatagttacgcctaaaccttgtaagatacgtaggaaattattcccctgaagaagaacctgaaagcccgaatcctgcatagcgtaacctcctttcaatccaactaaagactagagaaatcggcagcaacatcaagagataagccaccaccaacatgcctagagccacatcggtttcgtagtaaagaccaatcaaatccttagccacatacatcaaatccgccaaggctaccgctgagaatactgacgtttccttgataaggaaaataacgttagcactaaatgacggcaacgccacagctactgcctgaggaaggaccacatagcgaaagacttggaacggcgtcaaaccaatagacaagcccacttcatgttgggtctgactaacagcctctagaccacttcggaaggactccgccatataggaaccacccaagaaaatcaaacctaccacagcacaagcctctgaggatagaaccaaacctatacgaggcaagccaaagtagagaaagaagagctgaattaagagcggcgtattacgagatagctcaatataagccgtcgaaagctgactcaaaaccggcactcgataatgacgaataacactcaccaccaagcccaaaaggaaggaaccaaaaatccccagaacggcaatatgtaaggttaaaaagaatgccttctgataaaagggcaaatactgttgaacaatggaccagtccaaaacttacctcctcatttaagatacaaagggcgtagaaaattccgtaagacaaataggaaactgacgacgtgtgctggcacactaggaagtctatcttttgctctaggaatttagcctgtgttcaattctacaagatacaaaaggcgtgtaaaatttcgtgagcactcactgccatctacttctagccctttgaccttcactcgcctctgataatcatcgcgacacgcaaatcttcatcaaacacgaacgaattgctttatttcatttgaaacgttagatttattctaccacctgttagattatttggataatatgtattttttatcgaggtgataaagaaaagatataaataaaatctagatttctgtaaagaaaaaaacacctcagtctcagagatttctccgagactaagatgtctgtgttctaaatcatatttcttaaatcaaatggctttcacgtttatcaaacatttcttgtcccaaggttaccaattccttgataaggtctgagtaagaaagtcccatattttcccaaagaagtgggtacatagaccattgagtgaaacctggcatagtgttgagctcgttaaggtagatggctccatcctctgtcaggaagaaatcacagcgggcaagaccacaaccaccgagggcacggaaggccttggccgcataggcacgcatttgcgtcatgacttctgcaggcacgtgagctgggatgtccatggtaatcttattgtcgatgtacttggcttgatagtcataaaaagccacatctttgactacttcacctggatcagtcgttttgacatttgtattgccaaggataccaacctcgatttctcgggcaaccacaccttgctcaatcaagatacgactatcatatttgagagccaaatcaatcgctgaacgaagctctgcttcattttcagctttagaaatcccaacagatgaccccatgttagcaggtttgacgaaaactgggaaggtcaatttttcaagcgtctctgctactgctgcttccaaatcttcaccctcgatgaagactgtgtaggcaacctgaggcacaccagcaacttcaagaatatgcttggtcataatcttgtccatagccacacttgatgacaatacattagtaccaacgtatggtaacttgagggtttcgaggaaaccttggatagaaccatcctcacccataggaccgtgaagtacagggaataccacagcgcctgcttcataaatatcgcttggtttgatagcctgactagccactactgtgtcattagtcatgagcttctcgtcatcacctggtgtttctgtaaattcttgtgttttgataaaatcaccagactgagtgataaagtaggttttaacctcaaatgcgctgtaatccaccgcacgcataacactctcagctgagagcacagacacttcacgttctgctgaacgtccaccgtagagaaggataagggtttgtttagacataggtataccgttttcttttcttgattttctagtctcaattttgagaacataattaccttaatcatatcacaaaagagagggattttcaaaaagattatgggtagaaaaaaacagcctaagagctgtttcattcctgtcttaaatttcgtcaccaagttcaaacttagtgcctttgagggcacgtttgagagaccacttccatggtttaccttcgatagtgacttgtttgttttcgaggtcaacttgaaccttgtctacgcctttgacagcagagagtttttcggtaacggtgttgacacagccttggcatttcattcctgtgatgttatatgtttttgtcatttttctttcttccttttcttttattgttttttgatacacagcttaagtggcgggagttatatgaaactgacgcttagactttgcgacgtttgaggcgtagagcattgagaacaactgagacagagctaaagctcatggccagtcctgctatcattgggtcaaggagtgggccaccaaagaggtggaggacacccatggccactgggatagacaagatattgtagataaaggcccaaaagaggttctctttaatcgtcgtgatagttgcctgactaattttaagagccttaaccacatccatgagatttggtttcataaggaccatatcggcactttccatggcaatatctgtcccagaacccatggcaataccgatatctgcagtcgcaagggctggggcatcattgataccatcaccaaccatgatgactgattttccttctgcctgaaggtcgctaatcaccctagatttctcttgaggaagcacttgactgataacacgcttgataccaaccttttgagcgatggcttgggctgtttggtcattatcaccagtcaacatgatgacttccttgcccatttgatgaagggctgccaccatatcagcactatctgctttaacctgatcagctacaccaaagagtccgattaacttaccatcttcagccagaaaaataggagtctgaccatcggctgtcaagctttggaaatcagcttgtgctgaagtcaagtcgactttttcctctgtcattagggtttgattcccagctagataagtttttcctgcatagctggcagttagtcctcgtccagtcaaacttgagaaattgtccatctccaacaagtccaagttagcattttctgctgccacaaggatggcttgacccaaagggtgttcagacttggcttccaaggatgccaaaagctgcaaggctactccgctatctccataagtatagctagaaacgagctgaggtttcccctgagtaatggttcctgtcttgtcaaaaacgaggacgtcagccttatgggctaactcgagcacatctccacgcttgtagagaataccatgctcggcaccaaggcctgtaccaaccatgattgctgtcggtgtcgcaagtcccaatgcacatggacaagcaataaccaagacgctgactgctacggtcatggcaaatgtaaaggtttgtcccatgacaaagtaccagaagaggcctgaaacaagggcgatagccatgacaacgggaacaaagaccgctgacacctgatcggcaatcttggcaatcggtgccttagtttgttgagcatcctcaaccaatttgatgatttgggaaagcaaggtgtccttaccaatcttttccgcctcataaatcagactaccctgaccattaatagaacctgcaaatactggtttaccagctgatttttcaataggaagtgactcacctgtaagcatactctcatcaatagcagagctaccagaaatcactcgaccatccacggctatcttttccccaggtttgaccacaatatggtcaccaagaacaaccttatccacaggaagcttgacttccttaccatcacgaaggacagttgcttccttggctgacaagtgcatgagtttcttgatagcttctgaagttcgacccttagagagggtttcaaagtacttacctagagtaatcagggtcaagataacagccactgactcaaaataaagttggtgggcgtgatgggcatgccccaatgaaatgtggtaagtaccatagagactataaagaaaggctgccgacgttgccaaggctaccaaggcatccatgttaggatgacccttagccaaggtacgaaaaccattactatagaaggaacgacccaaccacatgactggaactgtcaaaactagcagcaccaaggcataagtcaaggctgcatgatgaggagacaagaagtttggcacaggtagaccgaccattggccccatagctagataaaagagaggaatggtgaagactgatgaccaaatgagacgctcacgcaccttgtgaatcttgtcttcttcacgttcttcctgacttttagctgtctctggattgtagacttcagcctcataaccagcgtcagccacagctttttcaatagcttctggactaaccttatccccagcataatccacagacattttttcggtggttaggttgaccacagccttgtccacaccatccaacttattaacagcattttcaacattggctacacaggatgcacaggtcatcccattaaccacaaaggtttcttttgccattcctatatcacctccatatgatgcccacaggcgcattggccaggcacacagtcacacaccacctgatccacaggttcttttgctagaagcaaggcctgtaacttatccacatcagcttgcgtcatgggtgtcttctcgataagttgccccaacaaatcgctgtgtttggtcaagcaaatcttgtcaaaaacagcctctaaagcttgaaaattcgcttcatcttcacccaagctagcttgatagataaaccctcgtccttgacgctgactggttaggtaacccttgtccgccaaacgtccaagcaaggtcttaactgtcgaagccgaccagtctagcttcttagctagaatcgctataatctctgaagaagtcgcttgccccttagcccagagcactcgcatgacttcccattccgcagatgaaattgtcagcatgatagctcctttctgaatttcgttgttcgtttacgtttgtagatttattttaacgctatcctagaaacgtgtcaagagttttgtctacatttgtagatttattttttgaaaaatttccaagatcacttcaaggaccttggaaaactttcattatcttaggcaaaaaattatgcctttagatttttctgatacagtttagtcataagcattattcccaagacaagtataatgactggaagactgtatcccaaataaatcgtagtgacctgcagacctctcttgataagcataccactgacaaatacaacaatccctgtcaaaacctgattcaagacttcgattttcaaataaagattgttgagttgtaggggattcaacttctcctgcaggtaaacattttgcgagattccagatatcgtttggccaactgctaaaaagatatagctaagcaaaacagtcgataggttaggtacgaatggaaagacgacaacgtaacccaaatagacaagagagcctaacaagtaaacggtcataggggagtatttagtgagacttttgaaagatagaatcgaactcgttgctagaaaggcaatggccaagaaggacagagagaaagaataggcctgactagaaataccgacatctttggtcaagaagataacctcataagcatcatataagacacccactgactgtaagagtatagtcatcataaccatcttaaggacgacactctgccttccaaaaataggactaccttgactggaagaaacctcctcttctgattcattttcacggtcaaaaataatcggccccagcttaaacaataagagggttgctagtagcgttagcacactgtagaccaaaaataagctccctaaatcaaggctaccccagaaaccaactatcataggtgctaagaaataggaggctgaaccaatcatagtataggtactgttaaatttttgcaagttggcttttttaacaagcacaggcaccgctgaggacaacaaactgttaaagtaagtcgtcagcacttcagtcaaaaccaccaaagcaaacacaaaaacactgcccatggcaagatagatcaaagccagacagactgccttaagcaattcaataccaatcaaaacatattttttatttgtgatttttcctacaaattggtgtcccacattggcaagaatccctcctaagaatttggcaatccatagccctaagacatagtccaccgagactttagagaagataatactcagagctatcgcatagccgtactcgataatcagcgataaaaacctattaaggaaaataattctggaattgttggtaaacattaacgatttctaaaccttttctttttcattgccattattgtaacactgaacatactagccttcaataggcactgacaacttgatcacctcattagaaaaacacctcctaagaggtgtcacactttactaagataagattgagttaacaaggctacgtccaaaacctctgccttcaccatacaaaaatgtaaacatgctagggaaaataatagccaagcaaattatcataaagagtattgctagagcttttttatttgatacaaagaatgacaaaatatgatcaatcatgttcagagatgccttctcttcctttctttttttagctataaacaagctataaaatcagtctatagttttcgaaaagaaaaaaatagtgacatttatgtcactaaaaaggcttattcattcgatacgagatatacaaaagctgattacgagatttaactctcaactcaagcccttgtagagatacaagacaccaaccaaaaggaaaatcagtgcatagtgattctctccccgatagaaaaatagtaaggctcctattaagaaacagattcctagtattaccctcaatgatactttcatttgtctaccttctttctataagtaagacgaaaataaaaacaagagatacatttaattcgctacaatccacccatattataagcttgataactaagaaaatcaaatgtccctaaagaatgattttgatgaaaaaatactccccatttctggagagtagcatcttctatttttcaaagtgtgaaccgaatgtaacaaattcagcaacttctttttccttaccgtcgtggaggtcacggacaatttttgatcccacgataacaccgtctgacacagcgttaaaacgtttgatgtcttcctctgttgacacaccgaaacctgtgagaactggaatgtcagcatgagcagtcaagttagccaagtgtttatcaaggtcatcacggtaattaccagtcttaccagtaacgccattaatggcaacggcgtagataaagccttctgcaccatcaatcaactgtttctgacggtcaatacctgtagtcaaacttaccaaaggcacgagagcaatatcactgtctttcaaatatggggtaataaagtcagcgtgttcgtctggcaaatcaggaataatgagccccttgacagatgtatctgcaagatccttaacaaaggcttcaataccatattgataaactgggttgatgtaggtcatgataaccaaaggtacctgtgttttttgttcttgaagcttcttgatgatagctgtcaaagtcacatctttagccaaactacgttgtcctgctagttcaataacgggaccatcggccacagggtctgaccatggaatacccacctcaatagctgagacaccactattttccaagagagcaatggtctcaaagagtccgtctagacctttagcgtggtcacccgccatgatgtaaggtacgaaaataccgcgtttactgtctttgatagcttgtaggtgttttgttaatgtttttgtcatggtttatttcccttctgcttcagcttcgaaacgttctttaacctgcataacgtccttgtccccacgacctgagaggcagacgatgaggctttggtctggcgacatcttagctgccactttttgcgcaagagcaatggcatggctagactcaagagctgggataataccttctaaacgtgacagaagtttgaaaccttcaagagcttcttcatctgtgatagagttgtaagtcgcacgtccaatttcgttgaaataacagtgctcaggaccaacccctgggtagtccagaccagctgagatagagaaggcttccatgatttgaccgtgagcatcttggaggacatccataagcgctccatgaaggatacctggacggcctttggcaaaggttgcggcatgtttttcagtatcaagccccaaaccagaagcctcagcaccatacatagctactgatttatcattaacaaatgggtaaaacataccgatagcatttgaaccaccaccgatacaagccattacagcatcaggcaatttaccgccagaaatctctgcatattggcgtttggcttcacgaccgatgacagattggaagtcacgaacaatttctgggaacggtgcaggaccaagggcagatcccatgatatagtgcgtatcctcgatacctgcaacccaagcacgaagagctgcatttacagcatccttaagcacgcgcgaaccatctgttacgctaaataccttggcaccaagcaattccatacggaaaacgttaagcgcctgacgtttaacatcttcctcacccatatagattgtacaatccatgtcaaaaagggctgcggctgtcgctgttgcaacaccgtgttgaccggcacccgtttcagcgatgattttcttcttgcccatacgtttggcaagcaagacttgaccaagggcattgttaatcttgtgggcacctgtgtggttaaggtcctcacgtttaagataaatttgcgctccaccgatatggtcagtcaaacgtttggcgtggtaaagaggtgtctcacggcccacatagtttttgagaagatcatccaattccgcttggaaacttgggtcttccttggcttcacgataggccttgtccaattcaataacggccgtcatcagcgtttctggaacgaactgaccaccgaattttccgtaaaatccttttgcatcaggttgttgatatgtcatgctttcactctttctataaatgctttaatcttatctaaatctttgtgaccatctgtctcgacacctgaggacacatctaaggcatagggctggaaagtttccttggcctctgccacattgtccacagttaagccaccagcgatgaaatagtcctgctcaatctgcttatcagccaagagttgccagtcaaaggtctggccactaccagcaatgggagcatcaaagaggagataatccgcctggctcttgacttgagaatcgctatccgaaatctgaatagctcgaataactggtactgaaatctttggaataaggtcttcatcaaaagttccatgaatctgaacgatatctaagggaaccttaccgattgcttcttccagttcttcaagactgggtgaaacaaagacaccgacgatttttgtctggcctgtcacccctttagccagctcgtgagcttgttcaagactcacttgacgcttgctcttggcgaacacaaaaccaatgtagtcagcccctgcttcaactgcagttgctaccgcttctggtgtcgatagtccacaaattttaacctttgtcaatttgcaactccttgaccttttcagccacattgtcagccgtcataagggcagttcctaccagaatcccattaaaatatggggcaactaaggcagcatcctgacctgtaaaaatggccgactcagaaatataaacaggcttgtccttgaaatgcgttgataactcaagactggtgttaatatctgtctcaaaagtgaccaaattacggttgttaacgccgataatctcagcaccaatacgatgagcaacttccaattctggcagattatgcgtttcaaccaagacttccaagccaaggcttgtcgcaaaatcgtagagctccttgaggcgagcctctggcaaggcggctacaatcaagagaatgactgtcgcacccgcattacgactacgcacaatctgtttctcatcaataatgaagtccttagccaaggttggaatagccacctgtgacgaaatttctttcaaataggaaatatcacccttgaagaagacttcgtcagtcaaaacagaaatcatggctgcgccattttcctcataggtcttggcctgagccacaatatccacatctaggttaatatcacccatacttggactagcttttttcacttcagaaataatttgcagcttgttttgatttgacttgagaaaatcataaagacgataggtcttacgtaagggctgcaagtcttccatgaccaactgggccacttctttttctttttgttctaaaattgttgggagaaaggctttactcatacttgtacctcttggagttggcgaagtttctctagggctgagccatccgcaatcaattgacgagcaagctcaacaccctctttaatggtcgcaaccttaccattggcaaagaagccaagacctgcattaagcactgttgtttcaagataaggacttgcttcatttttcaagacactaaggagaatctctgcattttccttagcatcgccacctgtgatatcagacaactcaaccttttccatacccaaatcttcataagtgaaagtgtgctggctgatgtgaccatcttccaaaagggtgtaggtgttggtgccatagagggcagcttcgtccatattgtcaggacctgtgataacaaccgcacgtttacgtcccaactgttgaatagcattagcaacaatttcttgtaattccacacgatagagccccatgagttgtgtctcaaggtcaagcggattagccagtggcccaaccaagttcataatcgttggaatcccaagagcttggcgagctggaccgataaaacgcatagctgggtgcatggtttgggcaaagataaaggccaaaccaacctcgtcaagtgctttagatagggtttctggtgatgctgcaacgttaattccaagggcttcaagcacgtcagctgaaccagatttagaggaaatcgaacggttaccagccttggccatacgaataccacctgctgctagaacaaaacaaacagtagtcgaaatgttaaagctataagactggtccccaccagttccacagttacacatagcatccgtgaaagtctcaggcaaggcagtcgcatgtgatttgagggcacgcacgatacctgtgatttcatctgctgtttcccccttagtcttaagccccataaggaaggcagcgatttggctttctgagacttcatttttgagaatacggtcaaagactgcttggacttgatcttgagacaagtcttggcggtttgagatttgtaggaatatttctttcatatctgttttccttttaaaaactgttcaatgttatctgatgcacgaggagaggttttgagcgtagacaaatctagtctaaagactgtccaactagcctgcaacgatttttacgaaattttcaaccatcttaagcccatctggacttccgatgctttctgggtgatattgcaaaccgtaaattggtagctccttatgctgaatggccatgatttcttgatcatcagttgtgatagctgtcacatcaaagccctctggcatttggtcaacaacgatggaatggtaacgcatgattggaacatcattgtcaatatccttgaaaataggcgatggcgtttcaaaagtgatgttactttgtttcccatgcatgacattcttagccaagccgagtttaccaccaaaagtttccgcaatagcctgatgccccaagcaaatccccatcatcggttttttaccagcgaaatccttaatcaaggcttccatcttacccgcatcagctggccaacctggacccggtgaaaagactagcccgtcggctttttccgcctcttcatagagggtctcatcatcattacgcaagacctttacctctgtaaatgtccctaggtattgtgccaaattataggtaaaagagtcatagttatcaactaataaaatcattgggcatctcctattcttgtcatagctttcgccttgttaatcgtttcgtaaaattcattttcaggaacactatcgtaaacaacacctgcacctgcttgaacataggctttttgatttttgagaatcatggtacggatagcaatagcaaagtccatatctcctgtcgcagacagataaccaatagctcctgcataaataccacgtttttcctgctcaagctcatagatacggcgcatggcacgaatcttaggtgctcctgacacggttccagctggtagggttgattttagcgcatctagtgctgtcaattccggcaagagttgtcccttaaccacactggtaaggtgcatcacatagcggaaatactcaacttccatatacttggtcaccttgactgtaccatttttagcaatcttaccaatatcattacgtcccaagtcaaccaacatacggtgttccgcagtttctttgacatcatgtgagagttcatctgccaaagcagcgtcttccgcctcattggtaccacgagggcgagttccagcaatcggattggttaccacctctccatttttcactgaaaccaaactctctgggctagcaccaatcacctgataatctccaaaatcgtagaaataaagatagtttgatgggttggtcacacgcaagttacggtagtaatccaaaggatctccctcaaagtccgctgaaaagcgttggcttagcacacattggaacatgtctccctcacgaataagtttcttagccttagccaccatatccatgaagacttctttttcgatatgatttgaaaattgcaaggcttgcaaggcctgaggtgtaaactcgtttggtgcctgagtctggagattggttaccacctgaccaagagcttgacgcaccgcatcgttgtcacgactagagtagatattgtcctcaaccacataaactttttccttcttatggtcaaaaatcaaataagactcatagatgaagaaatgcatatcaggtgtcccaatcgtatcttctggaatctcaccgatattttcatagagaccaatcatgtcatagcctgcaaacccgatagcaccacctgcgaaaggtaggtcagacttgatgcccttgactgttacttggtccaagtattcgaaaggatcttgatcaataaccttaccattttcataaagaacaccatccttgaaggttacttcaaagaccggattgtaggcaacaatagaaaaacgtgcattttccttctcacgaggaatagattcaaggataaccttgtgttccccttgaacacgcatataagccaagattggtgttaaggtatcggctggtaaaatttttctcataatatttcctttcaaactggtttatcgagagtaataagactgatgcaaggctcctttataggatgtattggcaccatattattctttgttcactttctcttccaaagcaataaatgctttaatcatgcttctccaaacactttcagccacatctggagataagccaagctctagtgcctccttacgacggtttgctatcacttgggcaacacgatcactagcctggacagcaaccgtgtctcccttgggcttaagccgtcctgccttttccacaagtatttgacgttgggccagtagtcgaagcaactgtctatcaatattatcaatatcaattcgaatatcgcttaatgcatccataaatacccaacctttcattgaataatgaaataacacttctttaaagataaaagtaaacaaaaaacctcacagagaaaaactctgtgagggcattaaatctagtttaacacggtaccacctcagttaatggtctccaaaaaaacgaccatcatctctatctcctctaacaaggagttgcacggtaaggggtgccaaccgagaagaatatgtattaccttctcattatcatccaatcagcccaatgttcgctcatctcgattacctactcacaatcaccgcaggctccctgaaaatctaagaccagttactttctgatttactaactattgtactcctttttagagagatgtcaagaattttctgttaattttgacaattcctcccttataagattcgtctatacctaattcagagagcgagatagtcttgtcgtcacactttacaaaataaaaaagtcccaaaagggacttctcggtatgataaacaacggcagggtgacagtcctgcatctctttcagacccgaaggtgcggcggctgcctcttccgccctcgttgttacttcttacttatattatatcacattttcttagctctaccagcatttagataatttttcagcttagaatctttaatcacaaacatggtacggacattaagtttatcacataatctgaccgctaccagaacattaccatcaatacgttttatatattccaaggactggccattaggatggcgaccgatatagtccggatgagcaataatctctggaatacgttcataggtagcatcaaaatcactgaattcctggcgatgtttttccatatgcttcttacgttgtgcagacagcgtgatttcttcaccaggcttgtagtccaaatcaaaagctttaatgacttttggtgtcaagtgccctactgttttcatgcctctattgtaccatacctcatacacatcaaggtctttcctactgttgaggtatcaaaaaaactcaagcctgttaccaagctcgagttttgacttatgctttttggaaagctccttgtttgtagctaatccagaagaaaagcggtgtgcagatagccattgctaccagatagattggcaaggtgtagctattaagtgtcgaaatttcaatcacatctcgaagatagtaagagctgattaagaaaccaaagactgagtaaataatcaaggccacacgtcccttattcaaggggatacaagcacgaataacggcaaggacacccgttgatcccatcatatagtaagacagcgtcagcatgtccgtattgctcataccaaggtatacctgagatagatggaaaataagaacactgacaaccagcatcaaggcattaggaatagacaactggagcgaacgtctgaggaaatgtttctcaacaggtcttatattacgttcgaaggtcaaaataaatggtggaagaccctcgataaattgccccgccaaagtcatctgaacctgaatgaatgggaagaccaagaggtactctgcctttccaaaaacaatactggcaatacagataagccccaaaaggaaggaataaaccgttttgatgaggaaaataggtgcaatgtgggcaatattattaaccacacgacgtccctcaaatagaatttcaggaatatccttaaactcggaatccataagcaccaagttggcaatctgacgtgtagcgggatccccttcagccataacaatcgaacagtccgcttcacgtagtgctaaaatatcgttgacaccatcaccagtcatagctgtggtatgcccgttggcattaagcgtttggattaacaacttcttctgatgcggagatacgcggccaaagattgccgtatcttcagccaaagcctccaactcctcatcactaaccttagaacagtcaatatagctttgataatccgcaaaaccagcctggtgggcaatatgagaaaccgtcaccggattgtcaccagaaataatcttcagcgtcacatcttctgaacgtagatattccagagtttccgcagcatcctcacgaataggatcggcaatttcaagcaaagtcaagccttcaacgtcatttggcaaactcatggtctctgtatcaaccgctgactgactccatgccaagatcaaaacacgagaaccacgagcctgcgcctgatcgactgcttttggattttctttaagaagcatctcaggcgctcccaaaaagagagttccgaccccatcaatgctcatagcaccccacttacgatcacttgaaaatggaataacatcgcctacttgataattatgctccagaccttcataggcatttcgaatcgcctgagccgttgcattgttatccttgctatgctgcatataagccgcaagcaagcgctccaactcctctttagtgaaacgctctgacagtagtttcagccccttaaccgtcatctttccttgcgtaattgtacctgtcttatctaaacaaagcacatcgacacgcgccaaggtttcgacagagtacatctcctgcaccaggatatgtttcattccaagcttaataacggccgtcaaaagagaggtaattgtcaaaagggcaatccccttaggcaacattcccaaaagggctgtcgaactggtaactaccgattcttgaagagagagctgtttaatcaagtaagcctcaaaaaagagcgcaagcccaaacggtatcacaatcttgcccgtaaatttagcaatcttatccatattatagaggatacgtgacacgattggcttatgcgtcttggcctctagcatgagcttattggcgtaattgtcctcggctacgttaataaccttagcataaacctgaccactcacaagataagaccctgagagcaactcctttccgtccttcttgagaataaggtcactctcacccgtcagcatagcctcattgagctcagccatcccatcaacaaccacggcatcactaggcacctgctcacccgcagacaagagcatgatatcatccaagacaatatcctgaggattaatagaagtcacctcgccatcacgcaccacacggatctgatccttattcatgagattgagcttatcaatcatgcgacgggcacgcaactctgtcatcatacccgtaaaggcattaagcacaatgattccgaagaaaaagagattcgaccaagcctgaacagcaatcaaggccacaaaaatagcaaaattgagcatattaaaggagttaaagacattacgcctaaaaatctcccagttgctggagccagtttttgctttaaaatgatttgttttaccggcatctatccgccgcttgacctccacctgcgtcaagccttgtaactgttttttcataactttcatagtagcataaaaatgaggtgttttcaaaggttagccgtcatagatagccaggaaatagacctattatatcgaaccactctcccaactatttcactcaacctaaactactttcaaatagcaaaggcaagagttcctacaaaacacttctatgctatcttatttcctaattaaacctactttgataaagtaaattaaacaaccattgaagattgattaatggttttgcttgagcatcaatcacaggttgaacagtttctctaatttctttttggacttttcgttgattatacttaatcttgtgataatgttcatcaaaagcatcttggagagaaaaattacgatttaaaagatagccatcaccagatgccgaactaaaatatagagtatcacctgaaagacctaatatagacgttttcgttcctttatttctagttatagcgtacattccatcatcatcatagctaataccatctatttccggtgtataagcccaacccatattctccatcagcataatgatgtcgggctctgttccctccttatgaggaatatgctgagcataataaacagagttaaattttatattaataaaagtaaataggctcattcccaagactgtatacagccctataattagtcctacaaagagcactaaaatgtttcttttttgcattgtcacttctctttctttttctctagttgaaactactttgataaagtaaattaaacaaccactgaagattgatcaagggttttgtttgaaccttcataattggggaaaaatcttccctaatctctcgtttaatttgtgattcattaactttagttctttttgcttcttctgaaaaataactgacgtggtcaaatctaaacgtactgtcaaaaccgatagtcatattatccttatcatataaaaagcttcctaagctttttgttaaaaaagttttgcttttagtatttataatagcatttgttccatcatcgtcgtatcgaataccatcaatctccggcgtataaatccatcccatattctctaccaacataacgagatctggctctgtccccaccttatgagggatgtgctgagcataataaacagagtggtattttaaatttaaaaaagtaaataggctcattcctaagactgtatacagccctataattagtcctacaaaaatcgctaaaatatttcttttttgcatccttatcttctctttcttttttatctccaatcgaattttgactggattaacaataaaccattgtacagtatttatcacaagtcttacaatttaatgatttgtacttgctcaaacatttgttatgaatatgaaaaaatcaagtctttataaatttctccaatgcctctccccactttgtcaatcaagctaaacatggtataatagttaagatttttatactacttatttctggtcagaagtgggcagtaaaatttaagaaacaggggctaatcccttgatatgaaaggaatctagaatctattatgatgaacatgcagaacatgatgaagcaagctcaaaagcttcagaaacaaatggaaaaaagccaagctgaattggctgctacaaccttcactggaaaatcagcacaagacttagttgttgctgaattaactggtgacaaaaaagtggttaacatcactttctctgatgctgtcgtggatcctgatgatgtggaaacacttcaagatatgactgttcaagcacttaacaatgctcttggacaaattgatgaagcgactaaaaaatcaatgggtgcctttgcaggtaaattgccattctaaaaaataaaaaggaatctcgcggttccttttttctatacactcattaagcaattcagtcataacatacaaaagacttggacaagaaatccaagtctttttgtgatagtcatataaaaattttattcttcaaccaaagcaagacctgactgtgcgtcttcttcattggccaatttatagcgattcttttgacctaagtagatgctcgctgaatttaatgaactttctaaagtagggtaattcacatcttcgttcgctgtttgggtaggtacaggtcctgaaattaatagctcatcatcattcttgacataaatctggtattctccaacttcgctagtttgagctaaaatctcattcaacaagtctgggtcgagcgtttgagcgacgccatcaaccacttgattggagtcctgcttatgctccgacgaatccactacttcagtgataacgatgtaatcaggagtttcctcatctgaagtcttagatccttcagtttctggctgtttttgtccagatgtatcttgtttcttcgtatcttgagcttgcccatcatgagtcttcaattcctcatcactaacggtttgaaccttagtttgattggcatctaaatcaagttttggcgcttctttaacgtcagctgaagctccactggtacccatgaatagagctagagtccccaaagtagtaatcaagctgattattgatttgccgataaaaccattattttttttcttattcataaatccctcactatttgtttggttagctctaactggctaacaaccgagtccaatttgctgctgtagaaggtaaaaggttgattgagctgtttgaccaacccttcacccagataacaatcttagcatgcaaaatccttgatttcaagtatttctttaatttttaagcattttaaataaatgacaacttcatgtcttaaaattgatgacaatctattatcagattagcttttttaagctatgcaaatggtaatttctttaagtagtacttagggaaacaatacttgttttttagacagattcttcaaaaaccacttttgctgactcatctcccccaaaattttatcggatagcaaaattctgtccaaacactttaaatgtaactataaaatagaattcttgagtaagaatgtcgaactctcaataccctaaaataagattagaaactaaagtccctcaattagttcaaagaaagttacaacaaaaggatttataaacaactttataaaccacctcccaataaacaactcattctaaaaatgtacatccctcatttagatatcacattttaaggtaatcacaacttctttaaaaataactaacacaaaaaaacgattaccaaaaggcccctatttcccaatgaataaattaacccttatagaaaatgtatcctccaaattcaaaaaaatggcggtattctggatagatccgtgctcgaaactatgaaaaactctttattcatcatcgactctgacgcaaaagcagattccctatgacaaccctattatgaaacatttaccgacctaaactctccgacaatgatgtaaatttggaaaaacagtaaatctactcagtaaaagactaaaaataacctaactttataactatttcaccaaattttcacctcactcaaagctcatctagaatagttttttctcatgtgtaaacgcttcgctcaaatttctgtcacatgtaagaaaatcttatcgtcttttaaacctttttttgcttcaaaacctagatattccaaggaaaatccgttacaatagagtacggaaagataggtaattatcagcatcattattttcgtatgaaagggaaattcatggcttatattcaaatgaagcatagctataaacgctataaaaccggtgatctggaaattatcgcaaacaacgacgtaagctttgatattgaaaaaggggagcttgtcgtcattctcggtgcctctggtgcagggaaatcaaccgttcttaacatcttgggtggtatggacaccaatgacgaaggtcgcgtcattattgatggtaaggatatctctgaatacacagccaaagaactgacaacatatcgtcgtgaggacgttggctttgtgttccaattttacaacttagtttcaaaccttacggccagggaaaacgtcgaactagcatctgaaatcgttccaaacgctaaagatgctactcaaacactcgtcgaagtcggtttgggagaccgcttagacaacttcccatcacaactatctggtggggagcaacagcgtgttgccattgcacgcgccgttgccaaaaatccaaagattcttctttgtgatgaaccaacaggggctctggattatcaaacagggaaacaaatcctgaccctccttcaagaaatggctcgcaaacagggaacaactgttattatcgtgacccataatgcttctctagctccaattgccgatcgtgtcattcgaatgcacgatgccaagattaagagtgtggaacttaatcctaatccacaaaaaatcgaggacttggaatactagaaaggagcaccgtcatgaaaaaaacaacttattggaaagatgtttggcgaacctttgtagcttctaaagggcgtatgctctctattgccttacttatggcactgggatcctttgccttgattggtcttaaagtaacttctcctaatatgaaaaaaactggggaacacttcttcaagacgcatcaaacagctgacttgagcttaatcagcacttacagtatcaaccaaaccgatcaggaccttctcaattcgattaagaaaaagaatgtagacatcgaatatggttatttcaaagatgctgttatcaaggggacgaatacggcatttcgtattttctctaaacctaagaaaatctctacttacgaccttattgaggggaaacttcctactaaggacggggaaatcgctctttcctcaacttataaagaagaatatagcgtcggagataagattaacttttctgagccagtagatagctcagggcaaaaacagttaaaggaacaaacatataccattactggttttgttaattcctctgaacttctctctaggaaccgtcttggtaatgccagtgctggtacggggaaactggatggctatgccattgttccagagacggacttcacctctaatgattacatgattgcccgcatccgctacaaggatttagaaaacgttagtccttttagtgaggaatacgcaaataagatttctgaacgaaaggctgaactcaaggaactctttaaagacgaacctgagaaacgcctcgctgaaatcaagtcacagtctcaagctcaaattactcaagctaaacaagaacttgaaacagcactcgcacagacccagcaaatggctacaagcaaccctgccgaagccgctagcgtcaaagaagctactaccaagattgaagccaagcaaaaagaactcgaagaaagtcaagcaatggttgataatttaccagcgcctagctatcaattctactctcgtcgagagattccgggttctgagggatatgttgcttatgaaagtaatattaacatcattcacgatgtaagtaacatcttccctgtcgctctctactttatggcagctttggttacctttgtaaccatgggacgctttgttgaagaggaacgtggtaaggctggtatcttcaacgccctaggctacagtaattcgcgaattatccataaattcgtcatttatggtttgataacgagtattactggtacaactgcaggtgttattaccggtcatacactacttccgattctaatccacaatacttataagagcgatttgcagcttcctgctttcgaattgcacttctacctaggacttactcttgtggccttccttttaggtctcttatctgctgtgctacctgcctttgcggttgccaagaaagagctctgggaaaaaccttcccaactcctccttccaaaaccacctcgtgcaggagctaagattgtcctagagcgcatcacacctctttggaaacgtctcagctttacggaaaaagttaccatgcgtaatattttccgctataagcaacggatgtttatgaccctctttggtgtcgcaggttctattgcactgctcttcgcaggtttaggcattcgatcttctgtatctaaccttaaccagcaacagtttgaagacatcattcactatgatatgattgttgccaagcaaccaaatacgtcaagtgctttggatgaggaactcactaaactcctcgatagcaaagacgttaaagaatacttgaatgtccattttgaaaccttgcaaaaaattgccggtagcaacaaggacacccaagaaatctcaacccttgtctttaacgaccgtgacgataaactcgttgatagttacgttagcttgcatgaccgagaccgtaataagactctcaagctatctaatgacggagctattatctctgaaaaaatggcaaaactcctaaacctcaaggttggagataccattactgtgcaaaacagtcaagatgaatctgtcaagattaagatagctggtatcactgaaatgtacatggggcatttcctctttatgaatgctagctactaccaaaaagcttttgggacaccttcagtgaataatgccaaccttgttactctcgctgaaccaactaagcaaaatgttgaaaatatggcagccaaattcatcaacttacctaatgtttatggtgttgttcaaaacaataaccttaaactgcaaatcagcactatggtcaattcattgacacaggttattggtatcttgattacggtttccattctccttgctgtggttgttctctataacctaactaatatcaacgtttcagaacgtatccacgaactttcaaccgttaaggttcttggtttctacaataacgaagtatccctctacatctatcgtgaaaccatttacctttcaatcatcggtatcttcgtaggattcggtcttggacaggcacttcaccattatatggtaagcatcattccgccagatcgtatcatgtttgatccatctctcggattggctacctaccttttaccagctgttcttatcggcataatccttattatccttggcttcgtcgtcaacaaacgtcttgccaaacttaatatgcttgaagccctaagctcagttgaataagctaaaaacgcctgagaagtaattctcaagcgttttttatgttcgataacctattttgttttagtcttagccaactccagacagtaggttttcacatgacaatgaggacaagtcagtttacgagtcctaggtgtatgtccagaaatggcaaactctttaaaactaggatcaaaggtcctatgacaattaggacagaggtattcaaactgctttctatagtgaaacatcactaaattcattactataataaaagcagggcagacaacaaacaaacctctgggatccttaaaataataaaagacaaccagtaggctcatcagataaagaagggagattagaacgacactcccatacattctcaactgcaaatgacgccatgatttttgattttccataagacgtgaaatgtctgacaaatcttccaacgaaagttgatgtcgtttagcagttgctttttgcaagtgacgggcacgttttagtttgacctctatttcctctgaagacttttccaagctttcaatttggtctgtcaacaacagttctaaaacctgttccctattctcctcttgcaagagtttttggatttgtttgattgagaaatccaaatctcttaagaaacaaatgacttgcaggcgttccaagtctgattcgtgatagattctccgaccaccctctgtgacttcagatggcgtcaagatccctcgttgatcatagtactggacagtcctaacagacacttctgctgctttagccaactctcctgttgaaaactgcgacatctcagtcacctccttttaagattttctatcaagggaggtctttcaccacctttgatacctagattctaccttataacgcaaggtaatatgcaagctataaccctagaggattttcttttcttacagaaaaagttagctatcactctttacaacctttacagctcttgtaaagctttagtcgaaaagaccgcccaaacctaaggcagcaaaaggattgttactgacttcttcctgttgctccagaagcttggcattctcatctaattcgagaaacttctcgtaaatctgagcggtcatccgagcatcctccaagctgttatgaccgtgtcccttgattccgaagaaatctgccacactggttagcttgaggttgacaataccattcaaatccgaagcacgacggtcaaaagcctcatcaaaaacatctaaagcatattgctcttccaagtccaaaccattttccgacaaaagaggcaagtccgacttaagggcattgtagccgataagtggagtgtcgccaacaaatgatttaaaatccgctagaacggactctagctttggtgccttggcaatcttgtccgctgtaatccccgtcaaaccattgataaaggagtgcaaaggaacgtccgaatagacaaaagagtcaaactgatccacttcctcatgctgagccatcttaacggccgatacttggataatatgtctaaccccgtccactgtgttgaactccaaatcaaaggcaatataagtttctaaattttccattttatctcctataatagttaaagctgagactgagtcccagcttctttcttattttccaaatagacgtccaaagaaaccttttttagaagcttcttcttgtttggtctggatttcttccacttgggccttggcttcgtcaacctcaaccttagcctcatcaagttctagtttaagctcttccttgtccttcatagcagtcaaggtcaattgttgctgttgatcgatttgcttgtccttttcagcaatttgaacgtctttgacacgcaattgatcatccatgttagacaactgctcatccttagccttcaactgagcataaagacgggcaatctcagagtttttctcgtctacaagaatctctaacaactcacgttgctttgtttcttcatcgattggctcatcgtcaaagatggttttcttgtagatttcctccaacttaatcaagccactgcgtttaacaacagtaacccctttagcatttttttctaaatcttcttctggaagttgtttgacacgattattgactgcttgacgactaacgccaaggatttcagcaatctcgctgactgtcttttcaatactcataatagcctcattttctcttgaaatgtcttactatgagaatatcacaatcactcctttctgtcaatttgactagttattctggatacctgaagggctctttttaagtcactttttcctttcactcttcaaacaatttacttgataggaagctaagcttttggtaaactatgtgtgggtataaatgtatatagaaggaaagtctttgacttaaacaatcggtacttccaaattggctttggtcggtatcagatctgttgtatctaggaatggtgggaacaattccacaaggtttgggattttcattcttgctccaattatgggtggcattcgagcaactttggttgcaaaactgcttaatatggaagcataaatcacattatcttcaacggtttgactgttggagtttttttattgtcaatccactcgctcactatagtctcatattgccatccgagattgaaaaaagccctaaattgtgccataataaacaaaagcaaaatagaaagaatgagtcctatgaaaaacttccgtgatgatattaaggtcaatgatttggcccagcccttcttagagccaatcgttgaacaaatgaccactgtattcgaccctgagattgagctagatatttacaaccttggtttgatttatgaaatcaccgtcgatgaaaatggccactgctacttccttatgacctttactgatactgggtgtggctgtgaagagactatgccttatgaaatcgctgaaaagctaaaatccattgacggcattaactctgtcaaggtggaaaccacttattcaccagtctggaagatgacacgtattagtcgttatggacgtattgcccttggtatctcacctcgaggcggaaaataaaaggaaaaccgattggacatttccaaccggttttttatattgagctaacagcagatagacgatcacttgtcataatgctgccatcaaccgtctcaggacttaacatcaaaaaatcacatcgcacatatgtccggtgtgatttcttttatattagtaaattaggctttacctgatttatccatgttccaaaagtcggtaactgcaccacgagatgctgaagaaacgatgtgagcatacttaccgaggacaccacggctataaagtggtggcaactcagttttagctttacgtttcgccaactcttcgtctgaaacgtgcatagtaatttctttggtatcttggtcaactgtaaccatatcacctgtacggaggtaggcaataggtccaccaacctgagcttcaggagcaatgtgaccaacaacgagtccgtaagtaccgcctgagaaacgtccgtctgtcaagagggcaaccttgtccccttgccccttaccaacaatcattgatgacaatgacaacatttctggcataccaggaccacccttaggacctacaaaacgtacaacaactacgtcgccatcaacgatttcatcagaaagaacggcttcgatggcatcttcttctgagtcaaatactttagcaggaccagtaatgttacgaactttaacccctgatactttggcaaccgcaccttctggagccaagttacctttcaagataatcaatggaccatcagcacgtttaggattttcaagcggcatgatgactttttgacctggtgtcaaatcatcgaaggcctccaagttttctgcaacagtcttaccagtacatgtgatacgatcaccgtgaaggaaaccattcttaagaaggtatttcataacggctggcacaccaccgacgttgtaaaggtcttggaagacatattgacctgaaggtttcaagtcagccaagtgaggtacacgctcttggaaatcgttgaaatcttcaagtgtcaaatcaacattagcagcgtgagcaatagcgagcaagtgaagtgtcgcattggttgaaccaccaagtgccattgtgacagtgatggcatcttcaaaggcttcacgtgtcaagatatctgatggtttaagacctagttcaagcatcttaacaactgcacgacctgcttcttcgatatctgcttttttctcagctgattctgcagggtgagatgatgatcctggaagactcatccccattacttcgatggctgtcgccattgtgttggcagtatacataccaccacaaccaccagggccagggcaggcattacattcaagttctttaacctcttcagcggtcatatcaccgtggttccatttaccgataccttcgaaaacagaaaccaagtcgatatccttaccgttaagattacctggtgcaatggtaccaccataggcaaaaatcgctggaatatccatgttagcaatggcaatcatagaaccaggcatgttcttatcacaaccaccgattgcaacaaaggcatcgacgttgtgaccacccatagctgcttcgattgagtcagcaatgatatcacgagatgtcaatgagaaacgcatccctggtgtccccatggcaataccatcggcaacggtaatcgtaccaaattgaaccggccaagcacccgcgtctttaacaccctctttggcaatttgaccaaaaccgtgcaagtggatattacatggtgtgttctcagcccaagttgagataaccccaacaataggcttttcaaaactatcatccgtcatcccagtcgcacgaagcatggcacggttaggtgatttaaccatgctatcgtagacagatgaacggtgtttcatgttattttcagacacgatattttcctccatagttaataactattctaatttaaacttctactcctattctaacataaattgtctaaaaaaactgaccatttaccaactattctccctttttaaattatgctaaaataaaggcatgaaacattttgatactatcgttattggtggagggcctgctggcatgatggcaaccattgcctcagccttctatggccaacaaaccctcctaattgaaaaaaacaaacgtctcggaaagaagctgtctggtactggtggtggacgttgtaatgttactaacaacgggactttagacgaccttctagcaggcattcctggtaatggacgtttcctctatagcgtcttttcacaatttgataaccacgatatcattgcttttttcgaggacaatggtgtcaaactcaaggttgaggatcacggacgtgtcttccctaagacagataaatcacggaccatcatccaagctctggaaaataaaattcaagaactgggcgctagtatccttaccaatacagaagttgtctccgtcaaaaaagttgataagcaattccaagttaagtcttcagaccagacttttaccagtgataaactcatcgtcacaactggaggaaaatcctacccatcgactggttcaactggttttggacatgatattgcccgccattttaagctccatgtcactgaacttgaagctgcggaaagtccactcctaaccgactttcctcacaaggctttacagggaatttctcttgacgatgtcactctgtcctatggcaaacacaagattactcacgaccttctcttcacccattttggcctatctggaccagccgccctacgtctttctagctttgttaagggtggtgagattgcccatctggactttcttcccaaccaaagccaagaaaatctcaagacttactttgaggagaatcgcgaaaaatctgtcaaaaacaccctcaaagcgcttgtgcctgagcgtgttgctgaattcctagcagaagataaggctgacagcaaggttaaacaactacgccccaaggacttggaaaacattatcagtcagcttaaggacatggaaatcccaatcacaggtaaaatgtcacttgccaaatcctttgtgactaaaggtggcgttgaccttaaggaaattaatcccaagaccctagaaagtaaaaaagtccctcacctacactttgcaggagaggtccttgacatcaatgcccataccggcggttttaacatcactagcgccctctgtactggttgggtagcaggtatccagagcccttgggattagaaagatttttcaattaaggacaacaaaaagttcccttctgtcatagaagggattttttgtctatttctcaaaggagaggaggggattcgaacccccgagccccgttaaggactacacgctttccaagcgtgcgcactcggcctctatgcgacctctccacatcaaacgattagcctattaatggctaatcgttatttttaatcaagttttcaagagttaatctttaaactgggcctctactcgatagatgacctgacctttttctgagaacttacgctcgtattcagtcatgacgttgccttcataatcactggcatgaaggtccaaccaaactttgttgagaaccattccatactgtgaaaagctcgccaaactgtattcaaaaagtccacgattgtctgtcttaaagtgaatctctccattttcaggcaaaatttgcttataagtatctaggaaagtcttgtatgtcaaacgacgtttctcgtggcgactcttaggccatggatctgagaaattcagatacatcatatccacttcgccatcttcaaaataattggtcaaggctgaaccatccacgcgcaagagtttgacattttcagcacccgaagccaaaaccttatccaaggcatagctcaatacagacagctgaatatcaataccaatgtagttgatgtcagggttttgttgggccataccagtaatgaaggcccctttaccagatcctacctcgatatggataggattgtcattaccaaaaagctcatgccacttacctttagcagcctccggctcaaggataacgtactgaggatggttagctaggtgttcctctgcacctttacgttttctaactcgcatgtctactttctaatatctgtgcaaggtctctctgaatttacgaagttcataaatttctcggttggcatgttccatatcacgactatcaaagaattttgaaatctgtgtcaaatatgaaaactgcccataccaataaatcttgtccatcacaaggtcgttgttcttatagccatagtatgacaaccactgtggccaatgtgccaatggaatgtaatggctgaggatctgcgccacatcatacatacgatctgttagacgtacagaatcccaatcaaccaaataaatcaatcctgaggttgtgatgacaaagttactatgacgagcatctccgtgaacaattgttgcaatttccgcacgaaactctggaagatgacgtttcaaatctctaacaacgtcttgaaggaagccattttcacgcaattggtaagcggcattttcctcccactcgtgtagaagatcgaaaggattttcaatatgataatccaactgcaagagttgattaaccaagtgtttagagcggtgcaaattaccaagaatttggataatctgtttactgttcatgtcatgtttggtcaaaatacgaccatcaagccactcctgtgcactcatcatgtcaccatttcccagacgcttagcccacaagagctgtggtgcaatctgttccttggcaagagctgccaagattggtgttgtattcatcttcacaaagacgcgatctccgtttgggtaggttcccatataggccttaccactatttcctttgagaggagtcaggctcaaatctttatctgttgatgtcacctaggcatctcctttttctttagtcattcgtttctattttaacttatttaataggtgttagtcaatcatcttcttaagcttggctggtaggtaaacaaggctcaaaacaagcatcattccaaccaaaatcagactaaacttaaggtcgaagagacaaacagcctgtaccagagtcatcccaagtacaatctggctaatcaagcgcttaagattgcttacctgcatgtcttttccaaccggcataaggttagccattctctgataagcaaagtgcgatttaagtgctgtgagctggaagagtaagaggtaatcaaaaacaaccacaagcaccatagccaaccatttttcaggaaccaaaaagataactagaagtgttagggcaaacaggcgtaaactaagggcaaagtaatctcctgaacgcaagaaagctcttaggtaaagattgtaccaggtatgttccttgtctttctttgtacgtttgagaatagcatccaaataagcacggcgtttaacactcgatgtaatccccttaacattggtaaagagtgaaaagaacttcagaatcgattgttgacgcttattttccgctgcaatagcctcagtccaattcagtcctgactgcttataataaggttgggactttttctggaaaataaagtacttaagaatagccatagccacagctacaaggataactccccaaactggaagccccaaggctaaaaagaggggaataaccaaaataaaaatcaggctttgtacgattacccaaaatctaaaagcacgccccgttgccttcttaacatggtctagcacttcttcttccttcaccaaaaggtaatgcttatcagcaggctctaaataagtcgcaatattcccccagaagggcaatagaagacaaagcacaagcaaaccaagaatgattgcccacggattctttggaaaatgtcgaagcaactggctatactgaaccaagacaaaacctagcagaaagagaagaaccaagataaagtgatcattaaagacgtagcggctatacttagcacagcgggcattgaatcgcttgctacgctccttaaatagcttagctatcatgacaattctcccttagttagctgcatgtagatatcgttaagactagcactctcatcaccaaaagtctgacggagctcctcaagagttccctgtgccaagacctgtccatggtgcaaaatcacaaagcggtcacacatcttttcagctgaatctaaaacgtgtgtagacatgagaatcgccttacccttagctttttcctcagccaaaagctcaattaagtctgagattgccaaggggtccaagcccaagaagggttcatcaacaatgaaaagacttggattcacaataaaggcacagataatcatgaccttctgcttcatcccctttgaaaattgtgtcgggaaccagtccaatttttcatctaagcgaaagagcttgaggtatttttccgcacgtgccatcccctcagtcacatcaagcccataggccattaacaccgtttccaaatgttcacgtagcgtcaattcctcatacaaacttggtgtctcagggatgtaaccaatcttttgacgataactagccgtatcttgctgtatggttaaaccatcaatagcaatctgtcccccatagggtgttaaaagaccaataatctcgttaattgttgttgatttcccagcaccattaagaccaatgaggccaactaattcaccatcagccacctcaaaagtgacatcttttaggacgggaatattggcatagccacccgtcaccttttctaatttaagcattatcttttctctctttggtatgatataatctattataacaaaaactcatggaaaggtcgttattatggataattgtattttctgtaaaattatatctggagaaatcccatcatcaaaagtctacgaggacgacaaggttttagccttcctcgatatttcacaagctacaaaaggacacaccttggtcattcctaaagaacacgttcgtaacatcttagaaatgtctgctgaaaccgctgagactgtctttagccgtgtccctaaaattgcccgtgccgtccaaaaagcaacaaaagctatcggaatgaatgtccttaacaacaacgaagaagttgctggacaaactgtcttccacgctcatattcatctcgttcctcgttacggtgcagacgatggtatccacatgggatttgacgaacacgaaccagacttcgctgccttggccgaccttgctgaaagcattgctaaagaggtaacagaatgaaactcggacgctttctagctcttggaacccttgcctatggtgcctactacgcctataaacgacgtgaagacatcaaagaggaaatcctagacctcaaccaatcacgagaaaatatctctcacgatctggacaatatcaaacgcaaccttgacatcatcaaggaacaaaaccttgtgcttgatgacatcaaacaagacctcagctataaaacacgtgtcttccaaaaagacctagaacctcgactcagcatcatccaagaacacttgcaaaagtatcaaggtgaggataaagaataaaggtaagtagcctgtgctacttacctttttgtgttgctttccactttttaaattcttgatattctctaaagctctcttcatcagacaactcatgttcttcatctgattcataagatggcgagacaaactcttcaaaatcatctaaaaatccgttattacgattttttctacttttcctccaagttctaccttgttttatagcagtgtctgaattgattttattatttattacatttcctgctatcgctcctaaaccgagccattttgctatattccctaatttattgattacctctgaaattgtagcaaaaatcatgataattaccacgaatgccataaagaaaaacattggccaaaataaatccattttacactccttgaaatgattttctcatattgaactattaaaattttttcaggctcgctagatacaatgaaccaccgattattcctaagattccgccaatccatcccaagaaaggaataagagaaatcgctcctccaacaatcaaaagtacactaggagcagttcctaccggagtatcccctttataatatacagcaccaactattccaagtactagtagtgctagctttacaagatatacaaacaaagtcattaatccagtcgcagcctctgatcccgaagatgctacacctaaaataaaccagattgcaaaaagaagaaagattcctccgattagtcctactactccatttgtcacagctaatgtttttgttttcatttgttctccttaattatattattgaatttgggttgaaatattatctgtatattctttcaacccattacggtaatttttcaagaattcaactagactatctttaccaacaatcttagtatttcccatcggaccgtattcttttttctgttcttccaaagactttaatgactcttgtttcatttgctcaattgtatttgcgtcatcaagtactgtaccagcaacagcattttgataattcgttagatattcatcaacaattttcgaatacatcgttagatagtcgttataggttgaaatactctcaattgtggcatcagatgtgtcctgagggttaaaattacttgaacttacagaacctgaagagcttgacgttgttgaagaacttgaagatttacttgtaactcttcctgaaacattttttgcagtatttattaagttcttactgaccgaacaacctgttaatgctatagatagtaaaatcacagcaaaagtaaataaacaatttttctttttcataaggattcctcacctaaatttaattttctgtaaacattatatatatatatatatatatacgttgtcaacgttttcttgaaaatagaatatatttttaactatttatcagattattataatttaaataattttatctcattttatatttaagaataaatatataagactttccgctgtgctaaaggtgagagaagcaatattgcttctctcactcggaagatttgagactcaggctcaaatcttaggaatggaattccgctaggaagtcgcttccgtccctagcacccaaggaaagtcttagaatagtctagctgatgaataacaggatttgtctttaacttttgtcatcacttaagcaaagtatcaagaaagaacataaaaaaagcagagacgtttaacatctctgcttcataaataggattaggaggctttatgctttttatttagcatctttttctttgataaccaagacaccatcttccatatcagcttctaggtgtttagcatcaaggttatccaagtggaagtctgtgactttgtcacggatttgttgttcaaccacacggcggagtggacgaacacccatgacttcgtcgtagccttcttcagtcatgtattctttagcagcttcgctaactgccaagtcaatgtctttcttagaaagcgtcttgttaacttcaaccaacataaggtctacaatcttagaaagatcttctttgctcaagtgtgagaattcgatgacagcattgaaacggttaaggaattctggacggaagtaaggtttcaaacgatccataagttctggtttatcagcatcttctgtcaagttagcttcgtaaccaaagccagcgtttgaagttgcgataatcacagtattcttgaagtttacagtgttaccttgaccatctgtcaaacgaccatcatccaaaacttggaggagaagggtgatgacttgagggtcagccttttcaatttcgtcgagaaggacgattgagtatgggttacggcgaacacgttctgtcaaagtattgctattgtcatcataaccaacataaccagctgttgtaccaatcaatttagaaacggctgtgcggtcgctgtattctgacatgtccaaacggatgatagcatcttttgttccgaacatatcaagagccaattgtttagccaactcagttttaccaacaccagtaggtcctacaaagaggaagctaccaattggacggttaccttcgtcaaatcctgcacggttacgacggatggcacgtgccactgcttcaacggctttatcttgaccgataactttagtttgcaaacggtgacccatatctttcaaacgttcgatatcagttgcacccatttgtgacactggaataccagtcatacgttctacagactcagccacatcgttaacagttgcagtgactttaaggtctgctgtatggttagcaattttcttttcaagttcttcaatacgaaccttagcgtttagagctgcttcgtagtcttctttggcagctgcagcttcttgtttagctttttcttcttcaatttcatgttcaacagcattcacatcagtcactgggtgttgagcagccaagtgagcagctgttacatcgacaaggtcgatagccttatctggcaagctacgttgtggaatgtattgtacagagaaatcaaccgctgctttcaagacgtcatctggcaagataacattgtggtgtttttcataaagatcacggataccttggagaatcttgaaagtatcttcagcagaaggagcattgaccttaacttcgttgaaacgacgagctagggcagcgttcttcaagatagtgttacgatattcatcttgagttgttgcaccaatcactgtcaattcaccacgtgaaagagctggtttcaagatatcagcaagacctttagacccttgaccatcgccagtgcttccggcaccaagaatttggtggatttcatcgaagaagaggataatgtttccagcttctttgacttcgtttaccaagttttgaatgttttcttcaaagctaccacggtattgagtaccagcttcaagtccagaaatatcaattgagatgatttccttgttcttgatagcagctgggacatcaccattgacgatggcttgagccaaaccttcaactacggctgttttaccaaccccagcgtccccgacaaggactgggttattcttggtacgacgagccaagatttcgcaagcttcttggatttctttgttacgtccgataacaggatccaatttaccttcgcgagcttcttcagtcaagttacgaccaagtttagcaaggataccatcttgtttaggtcctttaccttgttgttgagttgggttcactgcttcaccttcattaccaggcaattgacctgtttgacggtaaatcgcaaattcttcaggtgtcacttcacgaccgttaatcatatagcgacggttttctgaacggtaaccacccatgttacccatcaattgattgaaaagatcgtccatattgttaaagttgttgttcatataattacctcgttttgtgttttcttgtgaaattttttaagtgttatttttatgttaatgtgttttttgacttttactgaccaaaaccctaaaaatttttagtagcttcaactactcttctaataatttcaggttttgctcttggtaggagactgagaactttcacagtcttaaataaattgtcatttagcataagagccaccttctttctgtgaatctctcaatatagctaacttctaagcctctttcagaaagaaacttgtagattaaggaaacctttttccttatagctttatcatatacctttcatctgcttgggtcaagaatttagttttgacttttactgacctttcagatgaaaatttttgcagactagctgcaatcctttttattggtatatgggctattgacacagccttcataaggatttcatttccttatgtttatattgtacaacattggtcagtaatagtcaatagtttttttgactttttttgacctttgtcatatttttttgcagtcaaaccaaaataactttatgacaagtatttaggcaagcactgcaagatttataaggaagctaagtccttatgagattataatacaccattggtcagtataggtcaatagttttgcttgatcttttttgaccttttggaaaataatttacggaaagtaaaaaaagcctaccagaggtagacctaataatgatctttaaaagagagaaaggcgacactcttaccatcaatcatataaatcaaacgattttcagcatcaattcgccgagaccaagctccttgaaagtcatacttcaagggctctggtttcccaatacctgaaaaaggatcccgttgaatgtctttaatcagcttattgattcgcttaagtgtcttcctatcctgactttgccaataacaataatccatccatgcatcttcagtgaaagtgagtaacattttctactcctttagtgcatgttcttgagtctctccagcacgtacctgagccattcctcttaaaaccttgtctgatagttctttattttgaacaatacgcaatgtttcttgaatgctatcccactcactctttgagaccactacaatatcttcatcaggatttttattgactacagctagaggttcaaattcatcattaacctttttcatataatccttcaaatgatttcgaaacgttgaatagacgactgcttccattagcatacctcattttcctcttttcttttattatataccaaaaggataaacttgtcaggaacttgtacaagtttatcctttctattacatttattcgaaaaagaagcaaaaaagcctaccagaggtagaccttctataaagctattttactctatgtggtatgcgtccaaaattttgttgagaaagctcggggttgcctaattgataaacattatccgcttgctgtgtaagcatatcccaaggctcccttccaatccgagccactatatccacagattttttcacagatttgagatgagactgcccattttgagaaaatccaagcacatgaatggattcaggcagagggttgtccacagctccgaccaggatataggtcaaaatacgacgtacacgagcctttgtatagcgtttagttgctaccttatccactagttcctccacagaagaaatctcacggatagcagcttttaaacggctagcaatctcttcattcacctgaaaaacactggtcaaatcagggtttgtaagaatctgataaaccagcaattggaaataattatcccaagagacctgtggagatgtctgaaaaagtttactattgggcatgaacttatccacaaaatcactatcttgcctgtggagacgtagactggtcgctgaggcgaaagatacttccttgtctgaggaatgatagccagccccttgtctctggataggattcaacttaatgcccttaccagcacaagctttggcataggctaatcctaggatatgattgggtgtattgccagtaaagtccacaccagcaaatttctcccacattttttgcatcttctgtggataagataggtcacttggtaaattttccacaaaggcttccatgtcctctgacttttcagcatagacatttgctattgcctggtaatctaggacttcttccgtgccaaaagcaaggttatcaattcccagtcgggataagatatcgacggccccagcagcaaaataatcggcagactggactgacgtcaagaaaggcaactcaaccacgaggtctgccccattttccaaagccatctgagccctagtccacttatccacaatagctggctcacctcgctgaacaaaattcccggacatggcaacgatttttacgcctttagcctgatccaagagatacttgtgaccgttatgaaaaggattgaactcagcaataatacctgtaactgtcataggctcttacttttgggccacaaagaaccaacgggcactagtttcagttggttccttgtcctcgaaatcggcataaagtttgaaagatttgaagccagcctgctccagcaagatatcataagtcaagacctcataggtgcgttcctcatgcacctcatcatgacggctaaagcttccatcttcctcttggacaaagaaagttaattcatggacaatagaatgcggagccgcatcctcataggtatcccagagcatagcaaactcttctgcattttcatggtaggaatagccagggaaaacttcatccgtctgataggttgagtgcacatcaaagataaagacgccatcttcattcagtgcattataaacctccttgaagacgtccccaacctctacttcatcctgcatatagcagattgaatctgagtagcaagtcacaaagtcgtacttaccagcttgcgataaattcaacatgttgccttcaataaagtcaattttctgtttggcggaagatgcacgcttctccgcaatcttcaacatatcagcactcaaatcgagtccagttacatcaaaaccagcttgagaaaaacgtacagattgaatcccagttccacaagccaattcgagcaatttctttttgtccttagtctttggcaaatgacggagggagaaatccgtccacaaatcgtaaagattatcatccataacagcgtcgtagacagccgcaaaagtttcataagtagccataaatcaagatacaaagagcgtcaaaagcaaagaaagtttatctttttctcacagcttttagctcgtgttcagttgacaaaccaaccaaacacaaggctctatccttcctattaaatctttagtttaagcaacaaaacccagttgtcgccaactgagttcagattttatgccaaataagctgacacatccaccattggtgcttcatgccagagtttttcgaggttatagtgtgcacgttcatcttctgtaaagatgtgaacaacaacatcgttaagatccaaaagaatccaaccacccttattgtcaccttccatgtgactagcatcaaggccagcttctttcactttctcacggatgttgtcggcaatagcttccaactgacggctgttcattgcactcaaaataacaaaataatctgttagacttgtaaggccgtacaaatcaagggcaacaatgtcttcagctcgcttttcatcagcagctttgacaaccaattcaagtaattcttctttagtcaatgatattctccagtaatttgttattaatcttttaggtaatgcacaaaagcattataggtttccaaggtttgtgggaaaatcggtagagcttggtgagccaagtgttctaccgtatggactgtttcaaaagcaacggccttatccaaggattgctctgctacttgtctagcttcctctaccaaagggaaattacggttatgctcaatataatcagccacatagacaatcttatctagggttgacatttcatggcttccgacggtatggatcttaatactgcgtagaatctcagaatcagtcaaacccaaatcttcttggattttgtaaatcccaaccatgccatgccagacattgttcccccattttttcaattcagggtcgagctcatacttatcgattagctctaagaattcctgatccggaagttccttggcataatcatgaaggaggccagccaaaccagctttttcagtatcgtaaccatacttttcagcaagagcaacagcagctcgctcaacacccaaaacatgattgaagcgtttaggactcatgaccgctcgaactttttcaaggagttgttcacgagaatagtctagatatttttcataggtcatttatagagccccgctttcttgatgtaggcaagtacagactgcggcaccataaagttaggtgtacgatcctttttaatgtaggctctgactgcactcgaactaatatccataaggggcacatccacccagataacgggatatgaggttccagccttatacttaggacgctgaacaccaacaaattggaccatctcgattagttcatcaatacgatgccattttggtaggtattcgaccatatccgctccaataataaagtaataatccgtatcaggattagcctctgtcaagagcttcatggtgtcataggtatagctgattcccttacgttccaactcgatggtttcaatatccaaaccttcaatgccgttaatagccaacatgatcatatttaggcgatgttgttcatcaatagtctcttttttatcgacatgaggtggctcaaactcaggcatgagaagaacttcgtcaagacctaactgctgacgcacctggtccgcaacaaccaagtgagcattgtgaacagggttgaaatttccacctaaaattcccacctgcttacggccagtatctttgatttcttcttctagttgaacctttgtaaatggggttacgagatccagtgccatatacgcctcctctttttcaagcattatacaactgacttaaggctagctgatgcttcaaaagtgttcctataccttagtttatccttcaccaagcaaagtcagcaactatttttggatagctttgacctttggtgacaacttacgattttcttttttggctgactctttatagagaatcaagatacgtccaatcttaagaactgtatcacagccaatttcttcttccaagatttcagcaacctcatgaatatcttccatagtgttttggagtagggttactttgatcaattcacgggcatcaagggcgttgcgaacgctagttttgatatggtcgttaagaccgtttttcccgatttgtacaataggtttaagtgtgtgtgcttccgatttgaggaaggcacgttgttttgatgttaatgacatgtttattccttttaactacttaattaagtttaaataatcgcttttcgtacgacgacgccaacgccttctggtgcccaggcggcaacgacggttggttggtcagcttttccttggacacgaatccagcctagtcctgagaagacaatgtctgtcttatctttgacagtaaattcgtgacgaacaagttttggaaaatcagccaaatcctttggtccaggtggcatgagaagacttccaacatgcttatcatagaaggcatctgcaccttcaagtttggtgcgatgaagcttcaagttattatcaaagaaggctgtaaaaccttgcttattcccatcaataaagtcaaatcgtccaagaccgcctagaaatagtgtttggcctgcatttaactggtaagtttttggtttaatttccttcttaggactaacgtatttgagatccttcgctgacagatagtgtgccatctggtggcggtggatgattcctggtgtatcaaaaatgtaggtaccatcatctagaggaatttcaatcttatcaagggttgttcctgggaaacgagaagtcgtgataatatctttatcacctgtaatttccttgataatcgcattaattaaggttgatttaccaacattcgtcacaccgacaacataaacatcacgacccttacggagtttctcaatacgctgaatcaactctttaatggcgtgatgattttgggcagacgtcaacatgacatccacgggacgcatgccttcttcatgggcacgttctgtcaaccattgagttaccttaccatctttaacagatttaggtaggatatcctttttatttccgaccaagagcacatcattcccagaaacaaagcgtgacaagcctggaatgattgatccattaaaatcgaaaatatcaacaacattgacaacgagggcgtcactgtctccaacttcatgaagcaattttaaaaactcgtcatctgtgatgtggacgtccacaatttcattgtaatgacgaaggcggaaacaacgttgacagtacaactcacctgtttcttcagctttttttatagagctagcgggtgtgtaaccagccttttctttatcttctgtttgaatttgggctccacagccaatacaaaataattcttccattaaattcctttgttaaaggtcattggaccatatgctttttcaatctttttccacatgcgacgctcacgccaacgattaaacttggttacccaagcatctgattgcaccaagggcttaaccaaaatcgagcgaataccagctcggtggctagctctgatgtcagtcatgagctgatctccaaccataacgacctcatcacggttaaagtggtaacgttcaatcgcttcattaatccctttcgtaaaaggtttcatggcacgactcacgaaatccacatggaaattagctaccgcacgttccacacgttcatgtttgttgttagagaccacaaccaccggaatgtcagcctctgtcatctcatctaaccaagcacgtagctctggagtcccatcagggttgttccaagcaatcaaggtattatccaaatcgaccaagacagcacgaataccgtgttcacgtagctggtcaggtttcaaatcataaacagcctccaccataaaatggggcctgtaatcgtctatactcattttctctccaaaatgttagtttacctcttattttaccatatttttaaggtttatgtgtgagacttaagtcctattttttaagaacatctttgacacgacggtatagaaaaagagccacaatcacttgggctctatctttatctttgaattttctcttgttttttaagggctactaaatccttaagcgaaatgaggatgacagcaagaacaattaaaatcattccaagcacatcaatggcaaagaagtggtcacccatgattaagaccgttaaaatgaccgatgccactggttctaccgatgccagaagacttccttttacagcgccaaccatggttgttcccttgaggaaaactgtataagcaaaaactgtcccaatgaagaccaacccaaagagtgccagaagatttccaccagtcaagggtaactcatacttccaggcttggatagcaatcggaaagaccagaccaccgagtaacattcctagaccgatgacgattagactgccccacttttcaatagctttagcaggcaataagatataaagcgcataggtcactgctgaaaagaggccccagaacaaaccaataggtgtgatggctagctctgtcacctgaccatgcgtggcgatgataaaagttcccgcaatagccatgataatcgccactaactctgagacggttggaaatctgcggttcttagcacacacaaaagccagaataaggactggcgtgacatactgtaagactgtcgcagttccagcgttggtgtagtgaatagcactgagataggcatactgattcaagaccagaccaaagagagcaaataaggcgatacttactaaggttttcctatctttaatggcttgtactaatttgtcacgctgcctaaaaaagaccgaagccgttagtaaagtaccagctagaatcaaacgtaaactcgtcaaaagattgacattaaccccatgagccatcaggtattgaccagaaacccctgagattccccaggcaatcccagcagttatgaccatcagactaccttttagcgtctttgacatagtcgcctcccaaatctatttgtttctgttattgtaacacaaaaaggtcgaaacaaaacggcttcgacctttatctattcattcgacctttaaaagcttattctggttcaaccaagatcttaatttgagatttatcttgtgttaattcaacaaatccttcttcaacgatattttccaatttgattttcttagtaaccaatttctcagcagagaagtagccttgttccatcaattccaagactttagggaagatgtggcggtaggcaataattcctttgagagatttttcttggatggcgaattcatttggattgatgctggcttcacgttcccagatagatacgaccatacattccccagctttatgaacagctgcaagggcttggcctaaaacaactggaaccccagtaacttcataagaaacatctgctcccccaccggttaaacgatggatggcttcgacgattgtttctccttcttctgggcgaacaacaattgctcccaattcttctgctttggcttgacgttcaggagacaattcaaccgcatagatttttgatgctcctgctgcacgaagggcttcaacaatcaaaagaccaattggacccaagccaaagataacagctgtatccccagctttcaaagcagattgacgaacggcataaacagctacagcagcaggttctgtaagagctgcttgttcatagctcaagctatctggaatcacatggacaagatcaccatcaaggacacaatattttgcaaaaccaccatctgcagcgagaccgacgaagttcaagtttggatcgaggttataatcaccaatcaagttgtgctctgcaagaattggttcgatggttacacgatcaccaactttaacacgagtgacatcacttccaacttccacaatttcaccagagaattcatgtcccaaagtaaccggtgctttttgaccagaataaacatgttcttcagttggaatgaagattggtccatccaaatattcatgcaagtcagtaccacagattcccgtaaacttgaccgctacttttacttgatgaggttgtacttcaggtacttccacttcttcgatacgaacgtctttcgctgcatgccagcgagctgctttcattgtagccatatgataatctccttgttttcacaattttcagctttcttttcaggaaactttatattttaaattgtaaacgttttctttatgtttgtcaaggaaaaactagacaaaagagattagggaagcaccccataagatacttccctaatctcagcattatatacgttatttctttttgattcgagatacctctatccaccaaccgacaatccagccaaggactaaaagataattctcaaaagctccaacagcattaacagagtgatggtattgaagatagctaaggaaatgatttgttccaatacctagacctcccagaatcaaagcaatcagaacagctctcagataaaaccaatcgtacttgaggttaacggcaaggaggatgaccagaaccgccacattccaaataccaatctccctctgccatccaactgaaataccataccccgaatgacttcccatataggttgggaaaaatagctgaaaaataatagcaccagtcatggcaaggattactaagataaataagactcttaagaatttgttcatagggttgctcctgtttaaaagatgctttattgaatatcactagtataacaaaaaagacctaagtataacctaggtctttgaacttgattatgatctttcgaaaaaatactttactttaaatttgttcgttaatcattaggacaatagtttccaacataactcaatattttggatttccaaggattactaatcgctttttcgaaatcctttcttttaactcccatagaacttgaaatgtactcaatatattcttcttttgttcctccggtactataaaaaaaattgggattggttttttcatctataaatggtttaaagataagacaatcttctattcctaagttatctagtttactattgccctttattccaaatagcttttcattatatactattcctcgaaactggatactattgtcagacttatccaacttaaatataaaatcataatcatttatctttttatttttcttgattatatatctattaatattattagtaatgaagactttctcatataatgtttgaatcccaataaatattaacattgttattgcgaatgataacatggtggaaataaaaaattctcctatactttcaggatatttgagttctatcttgaaatttcgtcctctaaaaggaatgttaaacatttgtcctttagataataatgttaaataaatcctaattgctattaaatagataaaccagattattttaaaacaagtttcaaaataatcatatacagtacttgtttctgtattagagccatcaaaatatttactttgcatctcggaaaactctttaacatatggtaaaagcagcggtaaaaaccagactaaaatacttactgcactatcagataccttttcagtatcaggattcagtgaaataataaatataaacaaatcaaaaaataagaataaaaaaagaaaaaatagaatccccgagactaatccattaaatacaaactgcgataatgtttcatcaaatctttttgaaatctgatatttttcataaagataacccaagacaatcatacttattaaaaaaagaacaaatgataaaccaagtataagtccataatttttataaaagagtttataactaataacaaagaagatagcaaagaactgaaaacaacacagagtctcaataaacagaaacaataacctaataaaataaatacatactttatctaattttgttttaccaattatagaatttgaaaacctatatttaagaaatattattacaccactttgtataatccataataggaaaactaaattaaagttattataaaaaaaataaaccactagactaaacaaaagtagaaaagtaatcaatactatttcattaagaaagaattcttttataaactttttcatatttacctccattcccgagtatatcaaaaaaactagcctatattctatgttcaacaaagaatgagactagtttttatattagaaaaaatttattactcttcttttaacttagccaattcttgggcaagtaacttgagggctacttgtgggttggcttggcctttggttgctttcatgaggaagccggtgaaggccttgtctgcgttacgtttacctgacttgaagtcggctacggctgcttcattgtctgcaaagacttggtggatgattgggatcaagacttcaggatctgaaatctgtaccaaaccagctttttctacgtattcacgcgcaccgccaccgtttttcgctaagtgaacgaagactttcttagcaatcttagatgaaatggttccatcttcgatgatggcaatcatttcgaccaagttttctggtgtcaattggatttcttccaaagttttaccttctgcgttcaagaattgcgcgacttcaccttggagccagttagacacttgtttggcatcgccaccaagggctactgctgcttcaaagaagtctgaagtaactttcgtagctgtcaattggttggcatcatagtcagacaagccaagctctgccacatagcgtgcacgacggtcttttggaaactcaggcaactcagtacgcatttcctcaatccactcatctgagatttcaaacaatggaaggtctggttctgggaagtaacggtaatccgctgctccttctttgacacgcataaggatcgtgctcttattcgcttcatcgtaacgacgtgtttcttgacgaatgacaccacctgaacgcaagattttcgcttggcgttgcacttcgtattcaagacctttacggacgtttgagaaagagttcaagtttttcaactcagtcttggtaccaaattcctcttgaccgtatgggcgaagagaaatgttggcatccacacgcatagatccttcttccatcttgacgtctgaaataccagtgtattggatgacttctttcaaagctgtcaaataggcgtaggcttcttctggagaacgcatatctgcttcagatacgatttcgatcaatggcaccccttgacggttgaggtctacataagagaatccatctgttccatgggtgttcttaccagcatcttcttccaagtgggcacgttcaatcccgattttcttggttgagccatcttccaattgcacttcaatccaaccgttatatccgattggctcgtcaaattgcgaaatttggtaagcctttggattatcaggatagaaatagttcttacggtcaaagtgcatgtgctgatggatatccatattcagcgccaaagcagccttgataccagcatctacaacacccttgttcaagacaggaagcacccctgggaaagaccagtcaatcacattggtattggcattttgctcatttccaaagtgagcagaggttggtgagaaaatttttgagtttgtattcaattcaacgtggacttcaagtccgatgactgtttcaaagttcattaattgtcacctccgaaaataaggggttgttgcttgtggtaatccgtcgttgcttcaaaggcagctgcagcttggtagatggtttcttcagaatacttaggaccaatcaactgcaaaccaactggaagaccttgagcaaaacctgcaggaatcgaaatccctggaagacctgccaagttgactggaatggtcaagaggtcagccaagtacatggcaaccggatcatggttgagcgaatccaaatcaaaggctacacttggagctgttggaccaaggataaggtcgtaatccgcaaagactttttcgaagtcttggataatgagggtacggacttggccagctttcttgtagtaagcatcgtagtaaccagatgacaaactaaaggtaccaagcataatacggcgtttgacctcatcaccaaagccttgactacgagtattcacgtagatatcatccaagtttttagcatcttctgcacggaaaccatagcgaataccgtcgaaacgttgcaagtttgaagaagcttcagatgaagcgatgatgtagtaaacagcaaccccgtatttagagtgtggaaggctaacttcttcgacagttgctcccaatttttcaaagtgtttagccgcattgaggatggtttctttgacttctgggtcaatcccttcaccgaggtattccttaggaagggcaatcttcatgcctttaatgtcttgaccaatcttagaagtaaagtctgctacacgaacaggtgcagaagttgaatccttggcatcttcgctggcaataacattaagcaattgggcattttccttaaccgttggtgagaaagtaccaatttggtcaagtgagctaccaaaggcaatgagaccaaaacgtgaaactgttccataagtaggtttgagaccaacaatcccgttaaaagcagccggttgacggatagaaccacctgtatctgaaccaagggacaaacggacttgccctgaagctacagaagctgctgaaccactagaagatccaccaggcaccttgctgtggtcccaagcgtttttagtcgcgccatagtaagatgtttcaccagatccacccatggcaaattcatccatgttggtcttcccgatgacaatcatatctttgactttggcattggcaacagctgtcgcatcaaagattggctcgtagttatagagcatttttgaagccgcagtggtcaagatgccatctgttgagatattgtctttgacagcgagtggaatccctgacaggaggttgtctgcatcgattcctttttcatcaatggccttagcttgtgcaagggcagcttcttcggccaccgttacaaaggcattgaccgcttcttcacgcgccttgatatcgtcaagcgttgcttgggtcaattccgttgccgaaatttccttagagacaaggaggtcgtgcaactcttcaatggttttattgttgaatgacattaggcatctcctccatcttctaggatagctggtaccttgatgtaatagttatctttttcaggtacatttttaaacaagcggtcacggtcagtccctttttcagcaatatccggacgcaatacggtcttgcggtcagccatggttgttgttggggcaacacctgttgtgtccacttcttccaacaattccaccatgtcgacaattttagacaaggttgtcgcaaactcagctgtctcttctggagagaatttcaattttgaaagattggcaacgtgggttacctcttcttgcgtaattttcatcttgcttcctttcgtgaaatgatgatttttcaatactttctattttaccataattaggcctattttgcttggaggataaaaaaactgtagtaacttttttgtcactacagtttacagggatagagcttttttaaaacacttatcgtatggctaccaagagctttctccaagcttctagaatttcaagtttcaaatactgtttggctaactcatatgaggcttggtgcatagactcaagatcactttctaaggcaaatagaatcttgtcagccatctgagaaacaagcaggtcctcatccatagtctcgctataaggaaccagatagccattctcaccatctttgatgaaggttggattgccataacgggcatcaaaaccaaccagggctaaacctgctcctaccgcttccatcagagtcaaaccaaaggtctcccattgagaggtagtgacataaagttcgtactgtgggtagacgtcacgtaaatccgcatgtcctctaagtttgatgtaatcattcgccccaagagtatcaattaaatcttgtagattctcttgttccccacctttaccgtagatgtcaaaacgaagttttggctctttttgatgggcaagggcaacggctcttatagccaaatccaagcgtttacgtgggtccaatcgcgaagccgtcatcaaactgagaggctttctatgcccctctggaaaactaagattctccaaatgtcccactgctagggcataaatagcggcgtctgtgacaccttgcttttgcagcgtattctctaaaacagccttttgtgactcagtagctgtgataaagaagtcaaagcgttgggcgtacttaaagatgtaataatactcatagtagaggtccccattttcaaactcatgctctgaatgaaaaacaaaacctagctttgcaggtgagtccagttcataaatcggtcgcataaattccatcaaggaagccctatccagcaacaaggtatcctcagctgtcaaaggaagccttgctagaaaacgacgcatgacctctgtcttggtcactaaaatctcagtgcctagcctatataaccagctggctccttgcttgagttcttcaaaggcaatgcgaccatctttattgtgataacttctcctgatgatgatgcctttttcaaagtattctgtaaccaatttacttgttccataccattcacgcttcaatagcatgccattaacgtggtagtctacataccgcacactacctttttggtagggatccatcttaaagactaaagaagtaccatcagaacaggtataaacagagtctgtttcgctttggctcttcaaatctagacgtgtcaacttaaatttttgctgcaaggcccccactgtcaaagatgggatatgactgtcttgatctgtaaagccaaggtaggcatggaggagttcctcgtagcgatgccccaaagaaagatagtaatctaatttatagggttgtggccaggtcgtaaagataaacttagcaggctcatttaattcacgtagcatcaaagctctagacgcctgagccacatcgacaccattaggttcatagcccaccaataggttaaaggtgtaaatcgtcatctttttccccctccaatctagtaaagaaagctaagatttcttccctctcggtgagtttcaaaacctctttctgactttcaagagccttagggtaaaactctgcttgctgtatgagttgtcggaatccctgttctagttcctctaaggaagtataaaccgttggtaagtccttatagtagtgacgatgaaccgttgattctaagccaaaaagcaactgtccattttcaatcgcatccaaagttacatcagacacttcgcttccataattcaagtctaaataaatgaaacaattcctcagtagatcttgatatttcccctgacgaatccctgggtaaagatggacatttctcttatctttgagacaagtcaattttggccccatactagtttgggctccgatatgaaagtcaatatccggaaaagcatcaaccagatcatctaggccctcaatattttcagaagcagtcatcaccatggcttgaggcacaaaagtctgagaaccgtcttgttctgcaccagctaaataaatcatgcctgacttacgttcctcttggggataataattagtaaccaaaacatgattcacttgattttgaataaactcaagaccatcctgagtgtcggagcaataaaccagacgattaacattcaaggtctgcaatgtcgggattagattggaatccatacagatgatagcttcgtctgacttcaggatttgattcaaaacagccttagttaattcttccctacctgagaaaattctatctcttccttcagacccctgatcaatcaggtatccatcttgaatatagtgaagcaagacttcttcttggttacgattaaagtaaatatccataatgccttgcccctgatcatccagaagacgctgtttggtacgccagccatagcgattataatcatcaaccgcaacaactttttccccttgtccaaaccattggacttgtttgaccgtacgttcctttagattgtcacgaaaaataacactggcacggcggtcttgaccatcaaaaatgtaggtcgtaatccccaaagtccacaattcccagtatagtggaaccgacaaatcgttaaaaaagagtggtgtcccttgataatcttcctctgaggaataaataaatgacgatgctaaactaatagtgtccttatcaacatccgtttcaaaattcgtgtaaaacacacgggattggataccaaaggagtctagtaatcttctcagtttttccgttgcctgactaggttcttgtgcaataataagcatagttatcctttctgactaatccaagcaataaatagcttaaccttcacctttattgctccaaaaatctcaagttaacctgcgccgtcttataggtctcagtatcttgaagattagcttcttccattttttcaattgcccgcttcagacgcgtcttgtaaatataacggtgccaagtcaaatcatagcccaacatgcctagcaaagctagtttttcatttttagcttccatctcatctaagacacgcttctcggtccagacctgcgacagcgtatccttacgccccactcggtaccaatagatacatttttcggtatggacaacacgattggcctttaacaagagtttgtacataaggaagttatcctcgacgttcttcccaacaggaaaacgaaggtcctcgaacaaagaaatcttatagagtttcatcatggcgcatgcccaagccatatctcttgtctcttgaatggcatcttggtcaatgatgtctctcccctcataaagggtttcagaataatcgttctccgttaccttaatcaaaaacttactagtactctcgttgaataagttatagttggcaatagaaacatctgcctcatacttcttaagctgagtgtacaaggtctccacataatcctctgttacccaatcatccgggtctacaaaagtgatgtaatcacctgtggctaggtcaatccctgtatttcgggctgcagataggccgccattaacttgtcgcacatagcgaatacgtgaatctcgcttgaaaaattccttgcaaatctcctctgacttatcaggagagccatcattgacaagaatgatttcaaggtttggataggtctgattcactatcgtttccaaacactgctttaaataagcttccacattataaatgggaataacaatactaactacttctttattttccatggtctatctctcaatcgtatctatataatctcgaacagcttttaccatttggtctacttggtcattcttgaacacttgatttttcccagtttggtcgtgatttgttccttcaaaagagaaaatcggaagtcccaactgatgaatcgtttctgtgatatgatcaacctcatcaaatgggttgatatccatatagaaatctattttttctaagacctttcgactagtcaatggatcaaaggatggatagagaataaggtttggatactgctccaacttcaccaaattaaacccgaaatgagaatgagccaaaacatgaaaagctacatctggaagagcctgcagcaaatgttccaattcaaagatgtctgcagtattagtataaatcgccgtatggtaaggaaaatcacctaccatgtcactaaagctaagctttaaggatggctttctcaataagatttcttcccaagacagggcataataaaaccaccaaatatccctgaaacgattgaagcgtttggacgtccaaggtttattgtgagaagtgtaatgaataaccgctggtacccctttgaaagcatcataccattccaaatccccataaccatactggtccttatcagaacccacttggagattataggtccatgggagttgataccaagcatccttgaaataaagattcaagattccttgatccccataaacattttgatgatgctcttttgtcaagtcaaaaagagagtctgtcaccttgtgttgtcgccaccaatcggtatcaataaccatcaaaccagcgttaaaaccatctgttgtcgtcggacggtccactaccgctccaatacccaatccgccaagatccacttcaaaaagtggtgacaaatcctgcgtaaaaatcatatcgcaatccaaatagagaacacgattttcttgaacaaactcaggaattgcataacggaaaaaagtcgcataatgtatatgcgcacttggaagcgaaaattgtttaaagctttcggcagacacacgacaattgagaatttcagaatcaatagcctctaggcgacgattcatcagcgtaaaccattctgttggtaaattctcatttagcacataaattttccactgccctttatgtgtacacaaagatttaagagccacctctaacttttccatgtaggatagctctgctacaaatacaactgattttttacccatgttttcttcctctcaaactctaataagaatatcattttttagaaaacattacaatttctatcccttacaaaaaaagccaatcctaaggctgactttaattggagatcaattttattttagtgctcgttaaacgcgtaaaatagaattccgactagcacgtggcttttaaaacaccgaacacctctcaactcatggatgttattagtcgagaactcatgccctattctacagaggcaccgttacttgagataacttctttgtaccagttaaatgatttcttcttagagcgtttcaggctaccattaccatcgttgtcacggtccacatagatgaagccataacgtttcttcatttcaccagttccagcagaaacaaggtcaatacaaccccatgttgtgtaaccccaaagctctacaccatcttcattgatagcatcacgcatggccttgatgtgggctgccaagtagtcgatacggtaatcatcttcaacataaccattttcatctggtgtatccacagcaccgagaccattttcaacaataaacatcggtttttgataacgatcccaaatggcgttaagggtaacacgaagacctagtgggtcaatttgccaaccccattcagaagcttccaaatatggatttttaatagaggcaaagatatttcctgctgtcttttcattaacttctggatcacctgaagccacacgacttgcatagtaagagaaggagataaaatctacagtatgctctttaagaagggccaaatcttcttcagtcatctcaatctcaatgccatcacgttcccactgtttcttagcataatttggatactctccacgagcttgaacatcaataaagaaataactactacggtcttcttgcatggctgcccagtagtcacgtggatgggctgtatttggataatattgacctgctgccaacatacaaccgaccttattttcagggtcaatctcatgggccaacttcgtcgccatagctgaagctaccaactcatggtgagctgcttggtatttaacctgttcctcattctcaccctcttcaaagcagagtcctgctcccataaatggtgcatggagaatcatattgatttcattgaatgtgagccagtacttaaccaaacctttataacgtgtgaaaagggtacggcaaagattttcatagaagccaagcatcttacggttacgccagccgccatactcggtaatcaagtgcatgggacaatcaaagtgtgtaatcgttaccaaaggttcaataccatacttgtgacattctttgaagagatcctcgtaaaaggcaagcccagcttcatttggctcagcctcatcccccttaggaaaaatacgtgaccaagcaatagagagacgataggtcttaaagcccatttcaccaaagagagcaatatcttccttgtaacgatggtacatatcgatactttccttggctggataaaaatagccatcctcaaaatcaaacatcttacgacgtccggtgataattgaaaggcgatcctcaccaattggtaccacgtcaacattggctaaaccacgcccatcagcatcataggcaccctcacattgattggctgctgtcgccccaccccacaaaaatccatcaggaaaagtcatttttttggtcattgttctacctcttatgattcaagattatttcagtaatagtatatactaacatggaatcgttttcttatagtaaactacgaaaaactgatactatcctatgattgtagacaaaaaacgagagtaggacagattcccactctcgattataattcttattactccacaatggttgctccaagaacattcttaaaatgcccaatagcaaagtcatgagcttcaggcgtcaaggaagctgttgcacttgctacaacctcgatatcatagcccaaattataggcatcaatggctgtatgcagtacacaaatatctgttaaaactcctgtcaaaacaactgtcgtcacacgacgctcacgcaaacgaatatctaaatccgttcccgaaaaggctgaatagtgtcgcttgtccatccaaaagacacgattatcatccttgatggcatcatatacaccagctaactttccataaagctctcgcccagatgtccctgcaatattgtgcggtggaaagagcttggtttcaggatggaaggtatctccttcatcatgtcggtccatagcaacgaagatatagtccccattgtcataggcttcttgagttacctgagcaatgcgatcttcaatggcttgggcaggctttccagccgtcaacttcccatcatctgccacaaaatcataagagtaatcaattgatatcaatgcctttgtcattttactttctccttttaaaaaaagtggggcaggttcctcctacctcactttccttcagtattcttcttattcgtattctttcaatttatcgtagataccttcgttaaggactttaagataagtccctttcataccgagtgaacggctctcaataataccagctgattccaacttacgaagggcattaacgataactgaacgtgtaattccaatacggtcagcgataacagacgctgtcaagcgaccttccaaaccgtccaactcattcaagatagctgaaactgccttgatttctgagtaagacaaggtattaatagccatgttaatagctgtctgtttacgaattgtttcttccaagttctctgtttgaagattcaacaactgcaacccaactactgtagaggcaatctcaaccaagataagatcttcatctacaaagtcatgatcgttacgccaaatgatgaaagaaccaagacgcataccaccaccatagataggggcaattgtagtcaaaccatctgggaagtcgtcttttgattccacagggaaaatggtcaagtcactgtcaataccaatgttttcttgagtgtcataaacacggctgataccacgtgtatactcttctggaagctgtttggcttcaaaaaactcttctacacgatcattgttggttttgtacttcatggcaaaaccaaggagagcaccaccaccattaacgatagcagcgttacaatcaatgatatctgccaattgagcagccatattgttgtatggaagatctccttccaagctgtctactgagcgttgcaagatagatgtaattttacgtgttttagccagcaaatttgccatatttattgtcttcactttctattgtaatcataataatatcaagccttgtactaatcttctgcgtcaagacctactagccctatcattatagcacacttaacccagaaattgcaaacaattgtctgaaaattatttattattttactattcattatattatgtatattatggcatttttaggaaaaatgttcggattttactcaaatacatcccctttttagagacaataaaaactggacaagcctttttgtccagttttttaagaaattaacgcttgtaatatgacaagactcgttcgattttgttaccgagatcagccaactcttccacacgaggaaggtagacaatacggaagtgatctggttcattccagttaaagcctttacctggaactaggagaaccttctccttcttcaagagacgaagacagaattcttcatcatcttcaatatcatacatgttacggtcaatcttagggaagatgtaaagccctgcgtcaggcttaacagccgaaagccctggaatagcgtttacggtattcgtgataaactcacgttgttcatagatacgcccaccagggatcaagagttcatccacggattggtaaccaccaagtgaagtctgaataacgtgttgggagagcacattagcacaaagacgcatgttggccaacatattaagcccttcaatatagcctttgacattctttttaggtccagagagaaccatccaacctacacggaaaccacagatacggtgagacttagaaagaccattcatagacacacagaaaacatctggtgcaagactagcaatcgcagtatgctttttaccatccataaccaagcggtcataaatctcatccgcaaagataatcaaatcattttgtcgagcaatatccacaatctgttcaagaacatccttaggatagagcgaacctgtaggattattaggattgatgactacaattgccttagtatttgacgtaatctttgatttgatatcatcaatatctggataccagttagatttttcatcacagacatagtgtacggcattaccgccagctagactgacacaagctgtccaaagaggatagtctggcattgggaccaagacctcatctccatcatcaagcaaggcctgcatagacatggaaatcatttctgaaacaccattaccaatataaatatcatcaatatctacatttgggaatccctttagctggcaatactgcataatcgccttacgagctgagaaaatccccttactatccgaatacccttcactgttacgaacattcataattaaatcacgaatgacttcatccggtgctgtaaagccaaattccgcaggatttcctgtattaagacgaagaatcttttcaccattggcaatcatacggttggcttcatccaaaactggtccacgaatatcataggcaacgtgatccaactttgatgatttatcaaatgttttcataagttaatcctttcaaaagatactaaaagtagatacatctagcagaaaataagaaaattcaacacctgatggggatttccacttttattgacaccaactttaggcttggccatttggtatcatttctgaagacttgtcttcctcttttttaattatcatgtttcttacgaagctaataacagattgtattatacctctttttcaagcaatcttcaatttttagataatactgaaatcttcacattactaagagcgtcctaaagtaagcagtcaaaaaaagatttcagaaaatctataacaacgctttcattttttagattaaaggagtataataaagctaaagataggaggtagagcttatgtctcaacaatatgaacgtattatggtagctatcgacggttcttacgaatcagaactggcctttattaaaggtgtgcacgttgcaaaacgtaataatgctcagttactattggtacacgttatcgatacacgcgcccttcaaagcgttgcgactttcgactcttacatctatgaaaaactagaagacgaagctaaagctgttttggctgactttgaacgccaagccagagaagctggtttaaccaagattcgcaaagttattgagttcggtaatcctaagagcctcttggctgttgatatccctgataaggaaaatgttgaccttattatggttggtgccacaggtctcaatacttttgaacgcttgcttattggttcatcttctgaatacattctccgtcacgcaaaagttgacttgctcattgttcgtgactctgaaaaaacactttagtcacctctcacaagcacctctggtgcttttctcatatgaaaaagaaccgagatcctaaatctcagttctttttttgttctatttttcagactttgctgattcagacatcacttctgactctgaagttgactggctttcttcggccaagtcttcactagcagattgacttgaggcacctgcttgctccaaagcaagactagttgaaaggctctcacgctctgcttcctgactaaggctagcttcaacaatcatgagttccttttgacgttctgtttcacgaagatattcacgttcttcaagttcttcctgacgacgtctttcctgctcacgtctttgggctttttgacgctcacgcttagcatgacgtttttgcgtctcatcaatcaagaccttagtattgtctttaatatgcatccacttaataagacgaaccaagagtctccataggaagacaataattgactctgcaaagagaagaatctcaaccagaataactcccaacaagctccaagccatgaagagtgtaatcaataactgtgtgaaaatcttcttcaagtcacccaaatgattattgtgaatattaagggtctcaaggaaaagatctaaaatcccctgcaagaggtgtgatttaacagatttgtctccctctaggctcaagtccgtttggacttctgccggagtaacaactgtcaagtccccatcctgatagacatctatacggtctcctaattttatatcaaaatcaaaaagcgtgcgatctattttcttaagtcgcccgtcaggatgactgagataaacaaagtcatcatcaaattttaaaatacgaaacataatttacctactctttattgctccttaaataatagcaaagttaaaaagcccttgtcaagagcttcttttttaatccaaggttttaacaccgatacgatttttatactcttgatacgtttcagtgtgcataagagctttggcatttttgacccgatctgctgttggtggtttgaccccttccaaaggatatggaataccgagctcacgccatttgaactcacccattgtatggtagggaaggatttcaaatttatcaacatttttcaaggtctttacaaactcgccgagcttaatcaagtgttcgtcaaagtctgtcaaaccaggtaccaagacatggcgaatccagactggaacttgtttatcagacagatattgagcaaattccaagatattcttattaggttgacgggtcacaaacttgtgttgttcaggatcaatctctttgatgtcaagtaggaccaagtcagttacagccaaaagtttgtcaacaacttcatgatactcaggagtattgcggtaagcaaacccacaagtatcaagcgtacagtgaattcctagcttcttagcctctgtaaagagggcagtgacaaaatcaatctgaagcatggcctcaccacctgatacagtgatacctccatgctcaccccagaaatgacggaaacgaagagcctcatctaagacatcttcaaccgtacgttcaacagccttatttgactccatagcccaagtatctggattatgacaatattggcaacgcatcttacagccttgcatgaaaacaataaaacggatacccggaccatctacggatccaaaactttcggttgaatgaacaagtccagtcacctgactgtaatcaatttctgccatggcagcctccttgtaaacgctttttacatgtttttattatacctcttttatcagaaacatgctccatatctgcctgaattcaagcaaaggttatactataatacatctaaaattaaatgatatctatactataccagaagaaaaacaaaaaaactggaaaaatccagtcttttatcatctatattattaggcacgtttcttaagacccaaaaaggctgcagcagcaaggaagaatgttcctgccaatgtcaagattactgttgatgcttcaccagtcttaggaagtgtaacttccttacctttagcatctttaccagtcaatgtaccgtcagcattcactttgaatcctaccgtttcaggagcgacaacacttgttgtaccgtcagtgttagcgatgacaatttggctattttgtgtagacacaattgtttggccagctgcagtgataactggagctgttggtgttacagtaacaacaggttgtccattaacattcactgctggagtttcagggttttgaggtgcttcgcttgtccctttatcagttgctgaagctgggtcttctggtttctcagttggtttatcagctggttttgttgatgaatcagctgttggagccggtgtcgcaggtgtttctggagttgctggtgttgttggctcagctggtacttcaggaactgtaggtgttggtgttgttggcgttgccgcacctgtgtttgaatcattgctacgagccaagtcaccatcacttggggctgttgaaggaccagttgctgcatgatctgtcgttggttgtgtaagaacagcatcatttgtcgcaataccatcgtccgcaaaagaagttactggtacaaaagctcctagggtaagggtgagtaaaagcaagccactatatatagattttttagaagccattaagattctccttttttcatttatcagttaatttatattctaccataaaaaagtaataaaagactgttttaattaaaatcttatttatttttattctaaatctatcaatacactaaaatatgttagaacatctccaaaattatagttctttttctgacaaagtctggcagttttgataggtgaaagaggctttatgacgtactttataggcattttctaatcttattattttgataagctgatattccaagatagataagaaaaagcactttcactcataatgagagaaagtgcctaattagtaaatagtcgcttttaagttccaatattttctaataaaaacatgtagaaaactattcttctgcctcttctggagctgccgtgatgattaccttaagtttggttacacgaccatccttaaccttatcattgataaattcgaggtgtttgtccttgttgataactgaatagtgttccttgacttcttgagttggaatggctcccacacctgtcaaataataacctgcaatagtatcaacatcatcactctcaagttctgtatcaaaatgttcattgaagtcgttaagagtcatagctccctcgacaatataggtattctcaccaatttcacgaacttccacactagatttatctgtttcgtcgtcaatctcaccaacgatttcttccaaaaggtcctcgaaggtaacaagaccagcaacgccaccgtattcatcaagcaagatagccatctgattattggtgttacgaaaggctgccaagagatcatctacgaagatagtctcaggaacaaagagtggttcattcatgattcgacgaagtttgatattttcgaaaccaagttcgaaacctgctttaagaaggtttttggtatgaatgacaccgatgatcttatccttgtcatcttcgtaaacaggaatacgagagaaactttccttgagaatagcttggatattttcttgagtgttgtcttcaatatcaatcatgaaggcatctgtacgagggaccataacctcacgcgccatcaattcatcaagagagaataccccttggagcatttcaatttcttcagcctcaagtgtatcctcactcttggtcaacatgtactcaatctcatcacgtgtcatctgctcatctgcatcatcaaaggtagcaggtgtcaaacgagacaaaagattggttgacgccgaaagaatccaaacaaagggactaacaatcttacctgtaacaataatgacaggtgccgagtagatggctagattttccttgagattcatagcgatacgttttggataaagttccccaaaaacgatagagatataggtcaagacaaccaaagaaatcatgctaccagccgtcttagcccaagtcgcatgaccaaaccaagtcgctatcactgcacctagtgacgcagagagactggccccctgtaagaggctaataaaggtaataccaacctggatagttgataggaagttgtttggattttcaagaaccttgagtaggcgaataaatttcttatcgccttcttctgccttttgctctacacgtgagcggttaagtgatacgagagccatctcagatgctgagaaaaaggctgtaagcaaggttaaaattagtagtaaaatagattgaaataataaggactgaccactagagtcttccatttttttcttctcctctaaaaaaaattctgactttcattataccataatttcccaataaaggtgtctattttatgctataattagagtaatttatcatcaaaggagagacttatgtcacttatacgattagaaaatgtcagtttagcacgtcaaggaaaaacactcttgtctggccttaactggacagtcgaaaaaggtcaaacctgggctatcctgggacttaacggtgctggaaaatcaactctcttacgtttgttgacagctgaatttttcccttctgaagggaaggctgagatacttggctacacctttggtaatggagacatcacaggtcttcgtcaacacatcggtatcgtcagttcctttatcactgagcgtctgcctcaacatatgactgctgaaaaaatcgtccttacgggtaagtacaagagttcaatcctctacaaagcctatggagacaaagagttacaagaagccaaggatatgctgacttcacttggtgctggagatttgattggtcgtaaataccgtggcctctctcagggagaaaagcaaatctgtttgattgctcgtagtctgatggaagatcccgacatcattatcctggacgaagcaactgtgggcttggatctctttgcccgcgaaaagctcttacgtcagatcgaccgtatcacctcgcttcctcacgcaccactggtcctttacgtcacccaccatgctgaagaaatcactgaaaagatggaccacattctcctactccgtcaaggaaaaatcgtggcacaaggtccaaaaaatgatatcatcacaccaaaagttttagctgacttctaccaaaatcctgttcaaattattccaattgatgatcatcgtttttacattaaccctcttctataaaaatcgctcaaagaaacaagtcccctagacattatctgggggacttgttcttttatcactactcctcttttattttcgatacaccatacaaaattaaggctggaacgataagttgttctatagaaccatatgaaacaatgaatagcccagcaactacatatagacggtttttgttagcggtgcttatagctcttggaagcatcatagtaggaataataattaatggagtcatcataatgaaatacataaaccaaccaatacctgctaagggattagattcgtctataggatagtaaatgacagaagttaaattaacaactaaatccctaagcgctaaaataaaagcggtccaaagccaaggggaatgaagaatttgaggattgagttgtctttgactctccgcataatcataaatcttacgttcttcaactactggtttagtcattttctccaccaacagatcatcttctctaacctcaaatccatacttctgctgccatttttcaacgagtgtggaagtattgccgtttgtgcgatagacaagataagatgaaactactaggagaaaaagagagacatcagtaatgatatggtcaaccaagaaaccatagattaactcaagcaaactaatgaccatgataaggattgaagagattcttaatttcttttgagttgtttcagtcattaatgtaaggaacaaaaatatacttgcacactctagaacaggatacagtatgtagaaaataccactaatatcttttgtagtaatctttacgtaatgtgtagcccacactacagcaaccatccctagtccaagaaggggaacggaggactgccaagccgatgaggttttaaaggaggctaagagagttggaagctctaccttcttaatcataataacaagccaaattaggcaaataatagttaaaactggggaaaccaaccagggcttaaaaatggaagccggtattaagaaataggtaactagctgacaaatatggaaggcaagcacagctaagataccctcaactttccgcttgtccttcataagcctaaaaacaaaccagactaaaaagagttgctgtggaaattgagaacttagcaaggatacagaattgagcgtctcatactcaaaatgcaaaccataagacttaagcatagatagagccaacaatacttcaaaaaagataagtatataaaagcaaatttttctagacctacgaccaccccgcctttcattcaatcttagagagaatatctttcaataccattatactctttttatgtaagcgttttatttttatggtgaaatattttctattttctttacttgattacaaaacgctccttttttgaccgaatagagcctagaattaaccacatagacatatgatattgcctgcggggtagccttttgataacttagtaggtgttaaaacaaaatatctttcagacatagaaaacgaggtagaaacatgactaaagtaataggctttggattaatcggtacagcagtaacagttatcatttacagtattctcggcttccccaaaatggaggtgtccctttggccactattccctgttgttctatttgctttctttgcaatagagaatcttatcaaaaaagattataaatctagcctcatgagtactttgattggtttaatgattgctaatgcaatctatgacttgctccctatctcaaatagtgttttgattgttgcaggaatcctaacatgccttggtctaggttttctttttccaaatcacgatacagataaagagagacattaaaaagaagccaaaatttttggcttcttttgtgataacattcattgcttaagctcgacctcgagccagattaatcatatcataggttaacgtgttgctagtttctttgagagagtaatcctccaaagtattgacttccttacgaagctgcttggcataacggctagaaataagttcagcctgctcgtactcgttgataaccttacgttccaaatagtagccacgcaacatttcatcaatattgtctggatgaagatgggtgataacccgctcaacaaaggcacctgattgaataatctcagcctcttgaaggcgactgcgtttcagataagacaagagatctgaatgataaacaccttccagattactcagggcttccaaaatctgctcagtatttgtcaaatagagctcagtcatatggtcgcggttttcttccgtcaacctaggacctcttctcgtttcatcctgatcaatatgaaacttgaaagtaagagctaagtgtaacaatctacgaaggccacgcacaaagacagctagggcgtaagaaaggctagagacaaaaccacggttgatacgacgttccaagcccttgatataacgttggtagagattgtattcgagttctgaaatcttacccttcttgtaggcatattccagaccctcactctcaatttccataatcattactcggatattggccaactcttctttgacatcatttgattcctgctccaagattaaatcttccaagcgttgattgtagttgtcaatagtagcatagacagccccttgattggtagactgttttagatctttttccaactcatcgaccacatcattgagaatggcaatctgcatataatggttggtcgtgtgcgctggtccagtcgctagcttaggtaggactaaaatccctgttaagaagctcagcaaggtcacacccgctaccgtaaaaagcaaaagactatgttccagagcagtcatattggcaactggaagcaaaaggatggttgcaatggaaaccgttcctttaacacctgaaaaggttaacagagtagcacccttccagattttttttagtgatcgtttggccctccaagctctttgagcaaatactgcactaatcataacaaaacgaataccaaacatggtcgctgttagaaggatgatagcaagaagcatccagagattatcgtaagtactgctacgcagtactggggctgctagggttggaagttctgttcccaagaggaaaaagaccatgccattaagcatgaaggtaatggttccccaaatcgtatgagaaacactatccaacttagcatcaaaaacggtgatttttttgaaacgactggcaagcgaaatccctgctacgacaacagcaataattccagaagcatgaatttcctcggctacaaagtaagaggaaatcggtagtaccaactctagtaagagagcacctgtgacatcagcagcatccatattgtccaaaatggttaaaaagagacgattaaataaggctgtaatcaagccaactaaaaaaccaccaagcacagaaataaccaaattccagctcgcctcaaggagagagaaggtacctgtggtcaatgcagtcaccgccacctgaaaggcgaccaagccagaggcgtcgttcagaagaccttccccctgcaaaatgtagctaatccactttggaaaactgaaacgtttagaaatagctgaataggccactaaatccgttggcccaagagccgccccaatggctaggcaggcagacaaaggcacagcagcaggcaagacggccttagcaagataaccgattcccaaggtagacacaaagataactggaaaaatcaaaaatagaataagtttccagttacgtagaatactggtgatatcactttcttcaccctcccgaaacagcaagggagcaataatgaaagctaggaaaagttctgtttcaagctcgaaagcgcgtcccttcaaaagaaaaccaatacccactccaaaaataatttgaatcaaaggtaggggaagacgtggaaagacacgattgataacattcgataaaatcaagctaaaaagaagaacaagcaaagctaatgataaatgcatagctcctcctacccttccttatgacaacagtttgagaatagttctttttgcttactaatttttttatcaatggcagtgacatcttctttggccaaaagtttatggcaacgttcaacctcaagactagctaactttttcttaattttagccgttttacgattatcaaccttttttaaagtatcctcggcactttgcttatctatatatttggcctgcatatctgcaagcttctctttaatatctgtaatcattgtaatttctccaacatcaccaaaaatggtggggtattaatttgattaaggggttggtaaagcatggctgtaaaatcacgctggtccaaaccgataacgtactcaagcacagcatccttctccatatcgccgccatcatgaccatagtaaatcataatagctaaacgaccacccacctctaagcggtcaagaattttctcaatggcctcaagagtcgtgtggggtttggtgataacactcttatctgcagatggcagatagcccagattgaaaatagctgcacgaatcggttccgtgacataacggtccagattttcatgaccatctaaaatgagttccgcattttcaatttccaagtccgacaagcgttgacgagtcttttcgagcgcctgctcctgcacgtcaaaggcataaaccttcttggcaagaccagccagaaaggctgtgtcattaccgtttcccatggttgcatcgacagcaacactctcatcatccagcacttctgctagaaagtcatgagacagatgaattggtcgtttaatcatgctttttcctccttctcgttagctactttgcacccttgccatgagtcacgacgttccatctctttgtcaatggcattgaggacttcccatttgttgagactccacataggaccaatcaacatatctcgcggtgcatcacctgtgattcgatgaatgacgatatcctcagggatgatttccaactggtcacagatgatggacacatactcttcctgactcagcaatttaagacgaccctcgtggtagtccctttgcatacgcgtattggtcatcaggtggaggaggtggagtttaatcccctgaatgtcattgtccgtcacacaacggcgaacattctccaccatcatctcgtgggtttcccctggcagcccattaatcagatgcgacacaatctcagcctttggcgcacgctcacgcacacgcttaaccgtctccacataaagatcatagctgtgtgctcggttaatgagttctgacgtttcttcataagtcgtctgcaagccaagttcaacggtcacatgcatacgttctgtgagttctgccagataatcaatcacatcatctggcaaacagtctgggcgggtaccgatattgataccaacaacaccaggctcattgatagcctgttcgtagcgttccttgataacttcaagcggcgcgtgggtattggtaaagttttgaaaataaaccagatatttctgaacttctggccacttgcggtgcataaagtcaatctcatggtaaaactgctcacgaatcggcgcctcaggagctacaatggcgtccccagaccccgataccgtacaaaaggtacagccaccgtgggccactgtgccatcacggttgggacaatcaaagcccgcatctataggaagtttgaaaatcttttcgccaaaaatttcacgatagtaatcattgactgttctataacgttttttcataaagactattataacactttgaccttaaaaagagagtaagactaggacaaaaatcatggatttctgcctgtcctactctctcttcttacttagtctttttcaaataatcaatggcttcttgagctgttttaacagggacgattttcatcttggtccccagtttcttggcagcttccttggcctcttgatagttagtcttggcatccggatcagcctttttcatttccttagttactggattatttggcacgaagaaaatatctgcgccactatcagccgctgatttcaccttgaggtaggccccaccgatatcaccgacagccccatccttttcaatagtgcctgttccagcaattttacggccagccttgaggtcttgaccagacacctgatcgtaaatagccaaagtaaacataagccccgcacttggtccaccaacaccatcaagtttaaacttcacgttttcaggactcttgacctcagtatgatccgtcaaaccaataccgataccatttttaccattagcaatcttaatgatcttaccagtggcagtcttttctctgtcctctgtcatataagtgaccttgacttttgaacccaacttaagtccttggacgtatttaatcaagtcagtagaattatcaaaggtcttgccattgacagctgtcaccgtatccgcaatattaaggacacccttgaaactagaatcatcagccacctgaagcacataaacacccatatactccaagctagcctccttaccagccagagtcaagccctgataaatcgcctggttttgggaagtctccatgtagaattgattgatacgcatgaaatcttcgtcagagtaatttccagttgcctcttcagccgtttgaagctttgcaaaatcattaagctgagcatagagcatgagggccaaagtcgccttagtttgagccactgccacaaaattgtaggatccttttgaatcatcagctttcttatctacagtcaaaacttccttagtatcaaaagccccacccggaagctcaacataataattatttagcgggaaaaagagggaaaagaggaggaaaagtaccgtaaaaatacttaataaccaccacttaatccgccaaattttccctaatagtgatttagattcgttcttgtttgccacgcttggcctccacttccttaacaactgcttgcggaacataagaactaatgtccccctcaaaataaatcaactcacgcacacgactcgatgacactggtgtcacctcatgactagcaatcaaataaaccgtttcaagctcaggcgccagccccttattgaaataatccatattagcctcatagtcaaaatctgtcgcattgcgaagacctctaaccagataagtcaccccaagatctctggcaacatctacagccagactatcgtgagccgttataaccttgacattgggaaaatctgctacaacctcttccaagatacacttgcgagtctcaatgtcccagaagccctgcttatttttattataaaatagtccaatatagagctcatcaaagagcttgctggctctggcaataatatccatatgcccattggtaattggatcgaaagaccccgtaaacatagcaatctttgtcatagcattcctttctacaacttccctacaaaggctaacgcacgtaaacggtcaccttactgataccataggttttctgcttccaaatcccaaagtttgaaatttcttcaggcaagtccacagtcttatccgtctcgcaaaccaacataacttcttcagccaagagcccttgctcctctaactgagtaatattagccacaatctgctctttggcataaggcggatctaaaagcaccaagtcaaattgacccgtcaattgtgtcaatgcacgcgctgcatccatcttcaaaagttgaaactgcttctcactcttggtcatcttgatattttcctggataatagcttgtgcccgacgatccttttccacgaggacagcagacgacataccacgactgatagcctcaatagccaggctaccgctcccagaaaagagatccaaaacacgccctccatcaaagaaaggaccaatcatattgaaaatggcacccttgaccttgtccgttgttggacgagtcgttttgccttctaacgttttaagcggacgtccgccaaattcacctgctacaacacgcaagtcagtcacctcgtttttactgatttttagtaagacttttctattataccaaaaaaccacacatagatgttgctccaaaggaggctagaatggctaaagagcatcaaacaaacacaaaaaactcgagaacctcccgagtttccattcatgttacttatcaccaagtgcagtcacgtagttgtaggcttcgataccagctgtggcaccatcccctacggctgttgtaatttggcgaaggtctttctggcggacatccccaatggcaaagataccaggaatacgtgtcgccatcttatcatctgtaattacccaaccatcttggtcagtgatgtcgagacctgtcaagtaatctgaaactggatcaagtcccacataaacaaagacaccgccaaattcgtggttagtcacctcaccagttttgacattcttgatatcaacactgcgaaccttgatgtcatcacccttgatttcttcaacaactgaatcccagataaacttgaccttttcattggcgaaggcacggtcttgaagaaccttttgggcacgcaattcatcacgacggtgaacaatagtcacgctattggcaaagcgtgtcaaataaattccttcttcaacggcagagtctccaccaccaacaaccaagaggtcttgattacggaagaaggcaccatcacacaccgcacagtaagatacaccacggctgttgtactcttcttcaccagcaacaccaatatgacggtgtttagcaccggtcgcaatgataactgtcttggtttggtactcctcatcaccagttttgacaactttatagtcacccttgtcttcgataccagacacaataccataaagattttcaacgcccaatttttccaagggttcaaacatcttcattgacaattctggaccagaaatactttcaaaaccagggtaattttcaatatcagacgtgttattcatctgtccaccaggagcaccttgctccaaagttgccactttaaggttggcacgagctgcataaagtgctgcagtcatccccgcaggaccagctccaataacaattgtatcgtacatgagtaactccttatatgattttcttgtagagatatcttacacctaatgtgccaacaaagctagaattatgcattcagcacgataagaatcgccataaaagcaaatgccaaaactggaatcgaaaccatcgacatcataatagcatcatagagggcaccttgtcgctccttaactgtcttgtcagcacgacgtaacgcacgccatccaagccaaatggcaccaatcaccaagcacacaaagaaagcaatcacaaggcctaagagataaaatttaaaaatatttaataacataaatcatcctaaagtgaaaaatagaaaaggctgagataacattctccaacctctaaattcgactagtaataactgcacgatgcagcctctgattggactatagtcgcctttgaaacattcaaaagttcctaatcatccttgtgggattttgactatggactaaactgtaggcttatcccactaccttttctattgtaacaaaaatcccatcttaaagatattgttttgaataagaagcgaaaaattcttttgttcgttcttcttttggatggttaaagacttgttcaggtgttccttgttcaaggatatgccctttttcaagaaagagcaccttgtcagctacttgataaacaaagttcatgtcgtgactaaccaaaatcatggtctgacctgacttagccgcatcagcgattgatttttcaacctcaccaaccaactcagggtcaagggcagatgtcggttcgtcaagcaagagtacatcaggcttcattgcaagggcacgagccaaggccacacgttgcttttgaccacctgacaagtgacgtgggtagtgattttcacgattagaaagcccaaccttagcgagctcttctttagcaatcttggtagcttcgtcgtcagaaagtttcttaacaatcttaagaccttccttaacattatccaaggctgtacgacgttcaaagaggttgaactgttggaacaccatggacaacttacgacgaagagtaaggatttgctctttggtaattgtttcgaaatctaccttgaaatcatcaatggtaatggtaccagaatcaggctgttccaaatagttcaagctacgaaggatagtcgacttccctgcaccagaggcaccaacaagagctacaacttcacccttttcaatgtcaatatcaatgccatcgagaaccttttgtcctgaaaattctttggtcaaatttttgatactaatcattagcggtcacctccaattccagaaatgtcagtcacttcaggcgccttaatggccatgtgattttcaactgaacgaccaatgtactcaatcaagattgagattgcccagtatacaagagccactgagatataacgttcaaagtaacgatagtcagcaccacctaagatttgagcctgtgcatacatttcgacgataccagcactaaaggcaagtgatgttcccttagtcaaaccaatcaaactgttaatcaaacttggtgtcgcaataactgccgcatttggaatgatgacacgacggtaaacttgtgctgatgtcatcccaagagaacgggcagcttcgatttccccagcgtcaacggcctgaatcgctgcacggatggtctcactcatgtaagctgcttcattaaaggcaaaggctgtaatagcgaagatagctggtggaatctcattaatgttccaatctaagccgaactccccattcaagtaacgaaggaagagtggaataccatagtaagtcaacatgagttggacaaggattggtgtcccacgcaagaagctcacaaaaacggcttgaattggataaaggatacgtactcgattgattttaacaaccgcaaagacaagggccaaaatcaaaccgaagaaggcacctgcaatagtcaatcccaaggttaaaggcaagcgttccacaatcttaggaacagcatcgaagacagccttccatgagaagagcttaccagctggcatccaagatgaaatccatttgaagacaaccgtaaccaattgcaaaacatagccccaaaggatttccactagccatgataagggaatggctaaagcaaaagctactgccaaaccaaccaagccaaggataacttggagataccaaggtgaccgattaaatgcttctatactctttttcacaatgtcgccctttctttctaaaaaagtcggttagcctagagctaaccgttcaaatatcttatcataaattttataatattcattttagcacgactcagaaagtctgtgaaatagtcttttcttatcaaagtgataaggaaatcatatcactgataataataccttgttaagaccaaaaagatttgaactcattccttattttacgaacaaagtgagcataaaccgaggctttccggcgtgagaaaaacacctgaaactttaaagtttcaggtgttcggaagttttgagaccttaggctcaaaacttagtcatggaacttcgaagaaggtcgctgacgtccgtcatcacctcaggaaagcctcaaaagaaagctttgtgtttaatccacagctgagatggcaacctcaaccttcatcagtcttatttcaaatcactgacgtaatcgccaccaaagtattccttgctgagtttggcaagtgttccatccttcttaagctctttgatacgtttattgacaaaagtcttgagttccttaccttgcttatcatttgagaaaagaagatattcaagaccatcagtcttcataccgatatcgtctttaatcttgtttacagccaacttatagccttgatctttgacaatgtactcagaggaaatggcatcataaaggataaaatcaatttttccttcttgaatatgttgaacacgtgttgaaagaccagttgagctcgaagcgtagttgattgtaattggtgtcttgtccgcattggcatggttccaattttcaagcaactgagcatagttagagccaggaagtacttctgtcgtcttaccagacaaatcgtctaggctggtatacttggtaccctcagcactagtgatggcatagttagaacgtgaaatcggatctgagaaaccatatttctgcgcacgttcttcattatagttgaagtcgttagctgcaatctgataacgtccagaatccacccctgtcaagatggaatcaaaaggtgtcgttacaaacttgacctcatatttgtccgaatccttgaaaatagccttgaccaaatcaatatcataacccttgaagtcgtcaccttttttgaaagtgaaaggcgccgtatcagagtctgtcgcaacagtaatcatctgcttctcaccagatgacttaccgtcactcttgtttccacaagcagccaaagtcaaaactgacaagccaagaatccctaaacctgcaagccattttttcatatctatattcctcgatactttcattaatagttagtgataacagtttaccatcttcatcccaactcgtctaataataaaatcctaagtggtgatagataaaggttatagggggtgagaggaagaataacaagatagaaaaaagctgccactcatgtgacaactcttttcgtccaaaacagctttccatacatgtttaacatcaaatccaataaaacactacttatccttatctgatgacttactgcttgagtcgctactgtcttcaggttgatagtctgacaaattcttatggatacgttcggcgtaaacggctctacttcctgattcgtcatggtcgaccaaggcttcggcaagctctttataatcttctacagaaatagtccagtttccaccatcatctttagtaagcttgaaggtcttttccagattatcagcacctgtcaaaggtgtataggacatttctttatcaatgtccttaaattgtgtcaaatcaccgttaaagttttcaccataaaggaatttcgttgtgagatctttagctttacctttttccacatcgttgttatcagcttgattccattgtttcaacttgtcaatgtcattgtcatagagactcataaggagagtacgaacagcagctgcagcaccataggcactaacagagcgtgaagtaaaggtaactgtcgcttcatttcctttaactttgacatccttcagcttatagtcctgaatcttaccaatcatattacgacggaccttgaggaacttagaaagcacttgagttggggtcttagcatcataaccttcaatgtatttaaacgtatacttttcttccggtgtataccccttttcttcgatagtatctgcaacttgtttttcaaagactttcgtttccgtccaggtttcgtaattttcaccgtagagttttgaaaaaccgttactagattttccaagcatagtatcaattaaaactgtcgcatcagccttggcacgttctgtcggagttggtgtcgcttttttcttctcagctggcttattggaagcacaagctacgagaaccaagcaagctgccagaatcagtcctaaataggtaagaacttttttcattaagattattccctcatttcttttagttactatttaagatagcataggtctgataattcttcaaggtcactttccaaaagaaaaaatcaaaactctactattataatgactccaaatcatctaggtccaattgcctgccttcttgatcttccagccccgtcagcgtcacaccgagcaagcgaacaccactgctattttcctccagttggtcaaaaatggtatgggcaatcctttcgatggtgtcgaaatcctgggtcgatttgtccaaggtcatacgcttggttaaggtcgaaaaatccgaataacggaccttaatgacaacgattcgaccaacttttttatttttctgggcactttcagccacccgtctagcattctttgtcaactcagccttgatatcatcttcattataaagaagcttgccataggttcgctcacttccgatagatttacggacacgattgggcctgacaggactattggaaatccctctagccttacgaaagagatcaaatccgaagcgtccaaaacgatcaatcagcgtcatctcaggaatcttcagaagatcggcaccggtgtatatttccatgtcgtgaagacgttcaactgactttttacctactccatgaaacttttcaatagggagcttttccaaaaattcctgagcctcctctgggagcaccaccgtcaaaccagcaggcttttgaaaatcagaagctagtttggcgataaatttattgtaggaaacgcctgctgaacaagtcaggtgaagttcctgccagatatcatactggataagtttggctaccttaaccgccgatttgataccaagtttatttagcgtcacatcaagataggcttcgtcgatagacataggttctaccaagtcggtatagcgtttaaaaatctcacgaatctgcattcctacctctcggtaatgactataatttcctgagataaagacagcatttggacaacgttcataggcttccttagaagacatggctgaatggacaccatattttctagcctcataattacaagttgataccacaccacgtcccccagtttttctaggatcatgaccgataataaccggcttgtccttaagactggggtcatccctcatctcgacctgagcaaaaaacgcgtccatgtcaatatggataattttccgactggtatcatttattagaggaaactctaacatggctccctgcctcctttctcagacttatctcattgtaaagtttttcacataaaactttgggcctacaaagcattctccccctatgataccaaaatctatcaaaaaacagaaatttataatacagatttgtcgttttcaaaactgtattataaaagaatgtctctaaaaacagagttttaaagttgtgtaagcggttactgtgtgatagaatattcttagagaatgtaacagattatttgttactagaattataggagtacaaactatggcaaccgttaaaactaacacagatgtttttgaaaaagcgtgggaaggctttaaaggaactgactggaaagaaaaagctagcgtttcacgtttcgttcaagcaaactacacaccttatgatggtgacgaaagcttccttgcaggaccaactgaacgctctctaaaaattaaaaaaattgtagatgaaactaaagctggctatgaagctgaaggacgcttcccaatggatactcgtccaacttcaatcgctgacattgacgcaggatacatttcaaaagaagatgaacttatctatggtatccaaaatgatgagctcttcaaattgaacttcatgcctaaaggtggtatccgtatggcggaaactgctttgaaagaacacggttatgaaccagatccagctgtacacgaaattttcacaaaatacgtaactacagttaacgatggtatcttccgtgcttacacttcaaacatccgtcgtgcacgtcacgctcacacagttactggtcttccagatgcatactcacgtggacgtatcatcggggtttatgctcgtcttgccctttacggtgctgactacttgatgcaagaaaaagttaacgactggaatgctatcaaagaaatcgacgaagaaacaatccgtcttcgtgaagaagttaaccttcaatatcaagcacttcaagacgttgttcgccttggtgacctttacggtgtagatgttcgtcgcccagccttcgatactaaagaagctatccaatggacaaacatcgccttcatggcagtatgtcgtgtgatcaacggtgccgctacatctcttggacgtgtgccaatcgttcttgatatctatgcagaacgtgaccttgctcgtggtacttacactgaatcagaaatccaagaattcgttgatgatttcgttatgaaacttcgtacagttaagtttgctcgtacaaaagcttacgaccaattgtactcaggtgacccaacattcatcacaacttctatggctggtatgggtgctgacggacgtcaccgtgttactaagatggactaccgtttcttgaatactcttgacaacatcggtaactctccagaaccaaacttgacagttctttggactgacaaattgccttactcattccgtcgttactgtatgcacatgagccacaaacactcttctatccaatacgaaggtgtaactactatggctaaagacggatacggtgaaatgagctgtatctcatgttgtgtatcaccacttgacccagaaaacgaagaacaacgtcacaacatccaatacttcggtgctcgtgttaacgtacttaaagcccttcttactggtttgaacggtggttacgacgatgttcataaagactacaaagtatttgatatcgatccaatccgtgatgaagttcttgactttgacactgttaaagctaacttcgaaaaatctcttgactggttgactgatacttacgtagatgcccttaacatcatccactacatgactgataagtacaactacgaagctgttcaaatggccttcttgccaactaaacaacgtgctaacatgggattcggtatctgtggtttcgcaaatactgttgatacattgtcagcaatcaaatacgctacagttaaaccaatccgtgacgaagatggctacatctacgactacgaaacaatcggtgaatacccacgttggggtgaagatgacccacgttcaaacgaattggcagaatggttgattgaagcttacactactcgtcttcgtagccacaaactctacaaagatgcagaagctacagtttcacttcttacaatcacttctaacgttgcttactctaaacaaactggtaactctccagttcacaaaggggtatacctcaacgaagatggttcagtgaacttgtctaaattggaattcttctcaccaggtgctaacccatctaacaaagctaaaggtggatggttgcaaaacttgaactcacttgcaagccttgacttcggttacgcagctgatggtatctcattgacaactcaagtatcacctcgtgcccttggtaagactcacgacgaacaagttgacaacctcgtaactatccttgacggatactttgaaaacggtggacaacacgttaacttgaacgttatggacttgtcagacgtttacgaaaagattatgagcggtgaagatgttatcgtacgtatctctggatactgtgtaaacactaaatacctcactccagaacaaaaaactgaattgacacaacgtgtcttccacgaagttctttcaatggacgacgctttgggataaaataactaaagagctcgcaatagcgggttcttttatttttgccaaaaactagttttcattatatttttctaaatctgctatcatttacatttgacttttcatcagattagctataaaattagagcgtttccgtttggtatctccaaacgcttccttctcagaagcaccttagagaaacgatactcaatgactgttaaacggatggtttctaataacacgtagactatcattgttataagattaaagagtataaggaggacaaatgaataagaaaagttttaagataattggattagtctctctcgtagcaagcactgtcctactcgtagcctgccagtctgatacaaaaaacgaatcctcaaagtccaaggacgttcaatggggttatactggtgctactggtccagaccattgggatgacctttctaaagattatgaactcagcaaaaatggtaaagaacaatctccgatcaatatcaccggagctgaggacgttgatcttccagaactaaaccttaataatcaagaatcagaagctcaagttgaaaataacgggcatacgattgaagtcagctttaaaaatccaaagaataccctaacgattggtgatgatatctataaattacagcagtttcattttcacgcacctagtgagaatgaaattgatggtcagacttatcctctagaggggcacttcgtctataagacagataatggaaaaatcacagttatctcagttctctataattatggcgatgaaaatcaagccttaaaacaaatctgggataaaatgcctcaggcggccaatacagaaaccgagcttcctcaggctatatcactagacgatttctatcctgaagacaaggactactacaacttcgaaggttccttgacaacacctccatgtactgagggtgttaactggattgtcttcaagaatcaagaaaccgttagcaaagaacaagtggaaaaattcacccaaacccttggatttgaaaataaccgccctatccaagatacaaacggtcgaaaaattaaagaataaaacaagatcaaaagcttgatgatacctcctcgcatcgagctttttttcattgacaactaactatagactttgttacacttgccctatgattatcaaacatacaagagacacactctcagaaacttacctcgatgccgtagccatccgaaacactgtttttgtaaagggtcaaggcgttcctcgctccatcgagattggtgcgaatgaagcctactgcatccactttgttctatatgatgacaaaggcaaggctgcagcaaccgtacgcctactaccgaataaagacttgactcaggttacccttcaacgtatggcggtgcttgttgactaccaaggtcaaggtctggggagcattctcctaaaagaagttgaagattttgcacaagaacaaggcttccagactatttctctccatgctcaactcggggcacttaagttctacctcaataatggctatcaagaagtcggtaacatctttgaagaagctggtatccaacacattactgttgaaaaatccttactaagtaaaaaagcttaagcaataggtcaactgcttaagcttcttcttttgccgcaaatataggataaccatgctcgacagccagaactgtgacattttctctagcttttaatctctctgtgatttttttccagctacgatttcccataatgataacgatcatcgttaccatataaactaaaacagcaggatatctagcaaagtcggtaaatgtcaattttagggactccagaattttcctgagtataaaggcgtaaccaatcacaatatgagtaagcccacaaaagtaccctaaacatataagcaaatactctatttgaagcttcttggaacgctttttgtagagtaacttatagtcttgactgtacttttcaaagacaggaaaatgaatatcaaaccctcttctcatatgaaggactcttaaatcgggttgggcacgatacccaaggcaatgaatcagtttgtatagtagctctcttatcaaaatataaaaagaaataataaggttagataacaagctaataaataccaaaactacaaaagagcttacatctctatccgtcgtcaaaaaaatgatcaccactgtaaaacacataccacagacaaagagactactcccgttaagcatgcaaaagagcagactcagaaaccgagggacaaatctactttgtttaggtggcttaagcgaccgttgcattatgaactccttcttcgtgattccaatcaaaacatagtaatttttgattaacttggtgagcccttcgtataagcatcactttagtctttatttctttagaaaaatagggtaaaaatactcctctgagataacttttaagttaaaataacggacaaagtgacttttcagatgtatgagccatcttacagaaaaaatcaaaacaccacataagagcaagaagattatataaccaacttttcctaaggtgaagctataaccgattagaacgactaagatgatgaagaggtagagtctaccaagagtcgctaggaaataaagaaattgatgtctaagagagcgcttatcatatagtattttgtaggcatctgtcgttttttcaaaaaatactatatatgacgttctacctcggtaatcctcttctccaaaggggcgggcatgataaccacagaaatgaaaaagtttaaatatgatgccatgtcccatcctataaaatgtcacacccaaaagtatgacagcaataacttttggaatatccacctcttgcccgacctgaccaacaccaaatagatgcttcagccatacaaatgtcacataagacaagactatcaaacatatcttcaaaaagataaacaattgtgtcgccccggcactaatctcaccttctagaggattaaaagatgcccctcttctatttttatttgtcagaatgtaccaactccttcttcattatctcaattaaaacatctctgtccttaatccattgagctctctcatccttgtagtaagtacgattactgaggaaaatcgccgcacgttgagctgggatgttaatcagaacaaaggtacctgtataaccagtatgaagaatccactctccttgaaggtcccaagcgacactacgttccttgttggattggctgatattctgcgtcatatttttagcaaaatcatccgtcaaatagtggttaacaaaaatctctaagtcttttaaggttgaaaagagacctgccgaccctgtgtgttctttgagaactcgagccttgggatcatgaacagtcccacccggaaccccctcaacagttggaacagcaaggtcaactggcccaaaccgtgtttcagacataccaaacggttggaaaatttcggagtcaaaaagcttatccagtgtttgtcctgagactttctcaagcatcaaacctaggagaataaaattaatatctgtatacaagaaaggtttatcagccttaactttgatagcattaatagcagcaatcaagccagcttggtctaagtcatcacgatttggaataaaaggatcaattccgctactgtgagaaagaagctgacgaagggttaacgtcttatccactacttcaggatagtaagtcgatagtttctcatccaagtccaattttccagcctgcaagtagaaaagacagagggtcccaactccgactaccttggaaacactagccagatcataggtcagtcctggaactaccggatgatttccatcctgagttcctagataatgctcctgccaatcttgtccgtcataaagtgcaaggctggcacctggaaagatgtcagccttgatgtagtctgtaattgttgacaatgtttgttgaaaattagtcattactttgtaaaccaaacctcaatattgctcatgtcagtgagtgcgagcaagttccctttgctgtctaggtaactagagaactgttctttttcaagtttatcatgcaaggcaaccaagtcatagtcttctgctaccttaaactctagaatttccaaatcccaagtctggtctgaactcacttggaggtcaggaccttctgctttttcaaagtggatagacaaaggcaattcttcgccaaaaagattatcgtagaagaaagctgcttgggctgtatcaacaacgttcaaggtcaaagactcaaccgtaaagtctgacactcctttgaaatcttctttttcttcaacatctgcgtattcaactgtcttgagagtagacaagtcatcttcagcatgcatcaaaataagaccattctcaggtgagattgtttcaaaggcataccctttttccccttggaaaatagccttggcttggtgatcatcacgcgccaaaaggtattcaatctcaagtggatttgagactttaatgaccactttattaattttcttaggaccttcaacagcgcgacaacgataagctggtgactcctcaatcacaaaaagtgagttacggtctgtccaatctgtgaagacagcaagggcattttcctcagtcaaaagcttaaatcctaatgtattttggtaaaaatcaatattttcctgtctattattcacacgaaagattggtgtgtgaaacttaaaattccctgattgcgtcatgacaacctccattcttctctattttatccgaaaagagcttgtgtgacaaggattttcctaagaaaaaacagtattgtaattttttcactttctttcacacaaattatgaaaatcattacattatctttactttggggctagcattttcctcattttagagtataatagagtctatgaaaactcttgtcaataatctggcatttagacatgcctatcagggattttttttactgctgatgatagctatcccaaacatcaccttaggtatgacaaccttatataacaatcagactggattgacttttacgaagcttgaaagctggggagtcatcgctatcaatctcatcgttttttaccttacctatctctgggcaaagagtgaaggattgatgactcgttttagactagacctcaaggatgctaaagcaattatctggggctttctcactatcttcttgatgggagtcattggcagtaatcttatgctactaacccataccaactaccatgcagaacttcaaaagacgctcacaacaacgcctatccttccagtagccattggtatgatttcggcagccttcctccaagaaatcctctttcgcaagtggattttcacctggttagctccttattcgaaaacagctgtgctagtcagcactgggctcttttgtctctttcatatgccaactaatcttgcctacctcactctttatatcggaatgggcttggctctctctatggtctaccaaaaaagagaaaacttatctgcaagtatcacacttcatgttttatggaatctttacaccttaggtgctaccattctagtaatgactaatccaatgtgactgagaatattttctcagttttttattactttcaaaattttaagcataaaaaaatctgaagcactaacttcagattttttgtattgattaaaggtagaggaacttgaacaaagctatagctaaaactcctgctaagattggagccacaactggaacccatgcataccaccatttagaatcacctttgtgctcaccaagaactgttgttggcaaaatgtggtggagaagacgtggcatcaagtcacgggctgggttaagagctggacctgttgcaccaccaaacgaaataaccaaggctgcaaccaagaaaccaacaccgatgtgggcaaccgcaagtgcaccattagccatttgacctgttacagcttctttatcatacccatattgaactgcttgtgagactaatttgtgaccaaagtagttgttagtcaaggcaagagcaccaaagaagagaaggaatgaacccgcaaactcattggcaaaaccattaagccaagcacgtttgtgattttcctctgagtctgagttatcatcaacagcagagattgtagagaaggtaccgaggatgttgtttggattctcagtttgaagataataaggttggtgaacccaaaccacgatagcttgtcctaagaaagcaccgagaagttgagcaatcaagtaacctggaacggctacccatgagaacaagccagatgcagcaagtccaagtgtgaaggctgggttgatgtggttaccagaaacatcaccaaacataagtgctggcatcattaccgcaaaaccataaccaaaaccaataacaagccatccagacttactacccttagtccctttaagctcaacattggcaaccgaaccattaccaagtgcaaccatcaaagctgtcccaataaactcagtaatgtacttcataatccaatcatgactgagcgcttcttttagaaaatcattcatttgtctctttatttcctttcgattttacaataatttagacatctatcattttatcaagtataatgtctgatgtaaagatatttctgaaatgtttacgcattctttttgaggtttttgaatatgaaatttaaccagtttagttacatccctgttagtcctgaaattgcttgtcaggaactccgttctttaggctttgaagtctctctagatgccagtgccaaagccaattttgaggcttttgttcgcaagcacttccttttctttgaagatactgatttggctttgaaaaattggattgctgatacagagactgatctcctaaccttcttccaatcagaccgtcctttgactgctgacgtctttggtttggtagctcttcaaatgctaggatttgtccctaatgtagactttacagatagtgttgctttcctagaggaaatggctttcccaattacttttgatggtagccttaataacctccatcaattgctagcaacacgcacacagtctggcaataccttaattgatcagttagtggctcaggatttgattcctgtaagtaataactacgtcttctttaatggtaagatcttggcaacatttgacactaatcagcttcaccgtgaggtggtttatgtcgaaacacctgtagataccgataaagatgggcagttagacttggtcaaggtgactatcttacgtcctgatgtggacttcccagttccagccatgatgaccgcaagcccttatcaacaagggactaacgagcctgcttcagataagcttacccacaagatggaaggtgatttgctcgtcaaaccaacaggtgaaatctcccttagccaacctgaaatcgaggcaccagaggcagaccttacgcctatcaatcctgtcacaaaggctcaggagcgttttgctcacacagatacctacacgcttaacgattacatgttggctcgtggtgtggcttctatctatgtatcgggtgtcggtaccttcaattctgaaggcttcatgacctctggagactatcaacaagttctggcctataaagctgtcattgactggctcaatggtcgtgcacgcgcctttactagccgtagcagacagcataccatcactgcagattgggcttctggtaaggtgactactaccggactttcatacttaggtaccatgtccaacgcccttgctacaactggtgtggacggtttggagatggttattgctgaagcgggtatttcatcttggtacgactactatcgtgaaaatggactcctcgtcagtcctggaggctaccctggtgaagatcttgacaccttgaccgaatttacctattctcgtgccctattagctggagaatacctacgccaccaaaaagaatacgaggcctacctcaaagagctaagcacagctattgatcgtaagcatggggactatagccaattctggcatgaccgtaactatgtgcagttcgcagaccgtgtcaaagccactgttgtctttacacatggtagccaagactggaatgtcaaaccgattaacgtctatcaaatgttcagagcccttccagactctcttgacaaacacctcttcttccacaatggtgcccacgtttacatgaatgcctggcagtctattgacttccgagaaagcatgaacgccttgatttgtcagaaactccttggtttggagaatggctacacactgcctactgttatctggcaaaacaaccagtctgaacagacctgggaagttctcgataactttggacacgacaatggtaaaaacattccgcttggtgaggctgaagctagtatcgctaaccattatgaagaggaaacctttaccaaatatggtaaagcttaccaaagcttcaaggatgacctctttgcagacaaagccaatgccattaccttggactttgaactggaccaagatatccagattaatggtcgtgtccacctagagctcaaggttaagtctaatacaaaccgtggtctcatttcggcccaagttctagaaatgggtgacaagaagtatctcgcacctattcccgcactcaaacgcatgaatctagataacggccgtctcttcaaggaagaagccttacgtgaattaccattcaagcaggcaaaataccgtgtcattaccaagggacaccttaacctgcaaaatcgtaaagacctcctcaccattgagaatgtcactccaaatgaatggatgactatcggcctggacttgcaaccaaccatctacaaactcaacaagggcgacaaactccgacttgttctctataccacagactttgaacacactattcgtgacaatagtgactacgaattaaccgtggacctaagccaaagtcagatgacattgccttattagtatttatcgcaaaaaatcccataggatgagaactcccatgggatttttttattgtgtgaaaataaacaagatttaatcttcaatttttacgattcattttaatgttatttaaacaaatgatgtagccaagacagtggaacaacacaaagatatgccagtaaaaataaggcattaagctgtcagatttagtcaacgtataaaaaagaaaaatggcaactaataaaatagagaaccacagcgtcttcttaacgaataacaaatattgatgccatatctcttcatcactcaaagtaactttagattttttacttaggaaaagatgcatcaagatctctactagactgctaagtactgttaaaaccagaatcttacttagaggaatacctaaaaagaatcccatccactcaataagcaattgggacaaaacaatggccgtaagggcacgtagattttttgacataaaacttaaacctcacacttctctcaaacagaaagtttttacaatacctagaaagttaccaaagcatagataagcacttacagcctcgctatctttataagcacgtctatcataaactgcgattctaacctcgttcactttctttaatgattttaagcactctaggtgtcagaaaagctagtaaacaaatatccaaaacaatcacaacaataatgattaggcgccattcggcatctctcaccgtcagcaaacgataaacaccagctaaaataatagccaaatgtgccaagcccataccagagtaaatttgtttaggagtaaactgtcgttcctcaagtggacgattgttcagttctcgcttaatcaacagggggaacacaagtaaaaagattgatagcaatgccaaaggtagccatatccagattggatgctgactagatagagtatttaaagctatattaccaatgactactcctaggattgctgatacgacacgtaacgaacgtaacacagcagaactaaatttttgtaatatcaccatttaaactcctttttgctaggaccattcaaacaaattataaggtattatcatagaaatgtttggctattctttctgaatctagaatagctaaaacctcgtaaatatcacattaatcgtgacagattagagtaacgacatcacttctcatttctacaaatcagctgactaagatcatcagagagcgatgaagaaacataaagtgacaaggtataaaataaaaatgttctttcttgatgccagaaaaatgttatcacacattgaatacagacagccaaaataacttgcacgataaatttaatatattttctagaaataacaaattgttccaatagtaatcctcctttcatgacattttttgaagacccagaccctgcaagttttgtctatacgatagaagactatccttcaaacattggaaattcactctaattttcacatgtttcattaatcactttcttattataacacttttatgcaacgtaaattgaataatgtcacaaacggttactatattttctgaatggtggggttagagtgagctttagagtcttttcctctcaagatagtgacaaaacacaagtaatcggattatctaggactcaacattatttcttaaattgtgtccattttttaaaaagcagactataaagaagcaaggttagccccaacaagttaatggtatggtggactgcatccaaacttctaaatagattagcgaggcccattccgatgagaatggtagccagtaaatacggttttgagtttttgaacatacttttctccttaaagtgtttttagctttctgtgcaaagctatgatttttattatagattggaagccgataaaaaagtagtgacataaatgtcactacttgtctgaccttatatccttgataatcgtacacataagaaagagaaaaagacataacccaataatatttaggcattgaagtccaaaattcagtttttctcccaagttatgtaaggcaacaaggatgaagcccatagacatcattagagatactaggtgttttttagtcatgattatagataccttttatcttttaaaatattttttgacttgcaagtaagctagaaagtcacagagaattaataaaagcattaatacggccaacattatgcggtctgtggtatcactgaatgttagtaatgtgtaaaactctacacaaagcactagaaatgagatgaccagaaagacaatgaaggactgccgtattgttaacggattcactgaatctggacgcttcttaagaatatggtagagcagtccatttacaaaaatgactactaaagcaagtgctccgactgctaaccaaatctctgacgaagtcttacttttgtagagagaaatactggtacttataaggaagactgccaatatagcagtgacgaccctagaaaatcgcaatactctcgaacttatattcttcatcttcatgataaaacacttatgctatgaatgaataaccgctatcagtcttgtagactgaataagctattacattaaactctattcctttctttattttattatactgctgtaagatctcaagtaagcccttagcgattaaattctactggagatgtaatacagtagtgtcattagtactgatactttaaataagcgaatatatatatctttgttttttctattacaaagatatgcaatcaaatataatataatctccgctattatcagcaagaataattttacttcgggaacatcaaaaataagcatttgcaagccccgaagtagcacatatcatagtataaccccctgcggaaacaggtcctgctgcccatgccatgagcataccacctagacagccaccaattactgctccaactttcccaccaccagaaataatttctagatcagcatcgcacatcttattatacttagtcacattcattttttaacctctctaaaagctcgctccgatacatgctagcccaccagcaactgctccaacatgtgctcctacaaaagctcctggaaatgctgtaacaccaaatgctgccataccacctgtaaatccagcacctgcgccagttaaagctcctccaaagattaaatctttacatctatttccaccttcaacgtttgcaagtgccttgagatcgagtgtttcaaaattgttcattgtttgtgttgtcattctaacaacctcctaaattatttttagctttttctctcaagctatggttttattataggatggtagcccacaaaaaagtagtgacatgtatgtcaccactcgattttgatttttaagaaatcttttcgaatatagaatctatggtctagattagcttaggctccttccatagcacctgcttgtaggctgtacatcttatgataggtaccaccgagggctaggagttcctcgtggctaccgtgttcgatgatgcgacccttgtctaagacatagatgcagttggcatcttggatagtcgataggcggtgggcaatggcaatggttgtacgtccttgacgcatttttgctagagagttttggacaatagcctctgtctccgaatcaatattggctgtcgcttcatccaaaatcaagattttaggctgactcgcaacggtcctagcaaaggctagaagctgacgttggccagttgaaaaacttgaacctcgttcagaaactggagcatcgtagccttctggaagtttgtcgataaagtggtcggcatccacaaactcagcagcggctttgatctcttcatcagttaaatcttgatacatggcaatattggatttgattgtaccatgatagagaaagggttcctgaaggacaagaccaatgttcttacgcagctctgcctgactataatcgcgaatatctacaccgtcaagaagaactcgtcctgattggaattcataaaaacgcatgaatacgttgataatagaggattttccggaacctgtagaaccaacaaaggcgatggtctcacctttattgacagagaaggatatgttatctaaaatctggtgtttaccatcataggagaaagagacattttcaaaacgaatattcccctcagtaaccttggcatctgtgtctctctgttcaggctcataggtacgctcgtcaatcaaggcgaagacccgacctgctgagaccatcgaggtttgcaaggttgagaagttttgtgtcacttcaatcaagggatcaaagaggcggttaatgtactggataaaggcatacatggtccccgctgtgatacctagatagatgccacgatagccaaaataggccataagaacggcatagcccaggagcttcagtaagctcatggctgggcgtagaaagagagaatccagtgacatggaacggctagcataaatcaggtgttcctcattaatagcatcaaactcttttttgaggcgtttctcttggttaaaggcctgaatgatgcgaatcccttcgatactctctgatagtttggcatttatatctgaaagcaaggctctggtcttttcaatgataaccactgattttttgcggtaaaggttaaccaaaaggacaatcagaggaagaaagagcacaataagcccggtcagacgaatgtccaagatcatcatggtgtaaagggtggtaacaaagataaagatagccgaaataaagctagacagaatccctgagaacatctcgctaatagtctctgtatcattggtcaagcgagaaacgatagagcctgctggagttttgtcaaagtaagacatacctagtttctccatattggcaaaggcatctcggcgtatatccctgacaatactgtaggacacacgcgcaaaaaagagatttcccaaatactggactagcgtctgcaagagataaagcccatagtaaccaatcagaatcaagcttgccgcctgattaacatcatgcagatagtagtcgataaaataagaggccacaaggggaatgatactcttaataatcgttgtggacaaaaggaaggtcaaagctagaaaggtcaagaatttgtaaggcttgagataagtcaagagacgcttaaacacagaccattggttttgattaggcatcaacttctcctccttccatttctaactgttgagactcataggtcttggcataccaaccaccctgagctagtaagtcctcatgacggccccgttcaatgatacgaccattttgcatgactaagatgaggtcagcgtgcaccaccgcactaagacgatgggcggtaatgatcgtcgtcttatccttgcgggtatgtttaagattgtcaataatggaatgttctgtcttggcatcaaccgcagataaggagtcgtccaaaatcaaaatgtctggatccaaaatcatggcccgactcatggccagacgttgtttttgaccgcctgataggctaacacccttttcaccaatgatcgtttcaaagccttcaggcatatccttgatatcatcataaacttgagccaacttagtcgcttcttccaccttttcaaaggcgaggtcaggattaccaaaacgaacattgtctaaaatggaactggcaaagagaaactggtcttgaggaacataccccatcaagctacgcaagtctgataggcgatagtctctgatgtcatggccatttaaatagatggctccttgattaacatcgtgctcccgcaagagcaacttgacaagggccgtctttcctgagccagtctgtccaaccaaaccaagggtttggcccttgtccaaggtgaaatgaatatctcgcaaagtatcctcatcctcaaaagcaaagcggtcaatcgcatattctaagcaaccattttcaatacttgggagaggatgcgcaggatcttgaacatctgattcctgctccagaagattttcaatacgttggtaggacacatttcctctctgtgtgatattaaagaggaagccaatggccattaggggccaaaccagcatgtccaaataggtaatgaaggttaccaaatttccgaccgttatctgattagcctgaatcataaaggcaccgaaaagaagggtcaaaacataagatgagccaacaaagagtaagaccaaaggatcaaaaaggctgtcatacttcatagtatgcatattctttttaaatgtcatcttattggtctcttggaaggactgaagctcagcctcctgatagccaaaagacttggttaccttgattcctgataccgactcttgaaccttattattaagttctgaaaaggctgcctgggattctccaaaagctttatgggtcttgcgtcccaaacgactagtcgcaaaagccatgaagggtaggggtaagacagccaccagtgtcatctgccaggaaatgctgaagaacatggtgattagagttaccaaagctgtgatagacgcatccacggctgacatgacccccccaccagccaagcgggttaaggagttgatatcattagttgcatgagccatgaggtccccagttcggtacttttggtaaaaagaaggcgacatcttggtaaaatgctcaaaaaggcgtgacctcataatctgacccaagcgataagaggtcgccaagatatacatccgccaaacatagcgcaaatagtacattcctaaagctgccaaaagcaaataaacgagattcaaaagcaaaatctgattggtcagttttcccgatgtgatagcatcaatgacccgccccataaccataggaggaatcagattgagaaccgaaaccaaactcagtgccaatatcccgacaatataacggcgtttttctaacttgaaaaaccaccaaagttttgcaatgattgattctttaaaaaacaagttactcccctatccttacaagcgggtgattataattctaacgaaaggttatttccaatagcgataaattgtaccatcttctaactgaaagtgaccaatataagtcaatttcccaaaatcagtagactctggcaattgataggcaaaggagtcaaaattatagaccctgtgcccatcatcaatagagtatctctccttgtcatgaatgactgacgcatccttctttgggctccaaatgcgtctgatttcatcagatgtcttatattctctgacaaaattgtacaattcaaagttagttgcctcactgagatagcgaccatcggtattgtagttagctaattgaggctctctcttaacctcagaatagttccaaacctgccctctttgtcgcataatatcggcatcactgccactttgataagcatctgccttaaccattatcatcgttactcctagcgtcaatacagtgattactgtcatcataaagtgtttcattgtttctccaaaagtgtttattcatttttccctcttttgaatgtgttgtatttgtatgatagaaaataagtgaaacctgagacgcgtaagctcccaggttttttactctttaaaatgcgtttgaatcagttttacaaggaggcggtagacacctagtgccaccaaacctcccaaagtattggtccataaatcatctaactcaaagacacgattagcatcaatgagaaggtctagaatgacttgtccaacctcaatcgtcaaagacatgataaacgtggctaaaaggaccttttgccaagacctgaatctggggtacaaggctaaaagtcctaaaatcagcggactcagcaagaaaatgttggtcacattttgcccaagcacaaagacaatctctttaagactatccaactgataaaagttggtcaaactattgaatggggtcaagaggaccaccacacgaccaaaatgttgaatcccaggagtttcaacaccttcaactagtccatactggggtgtccaacaaaggagtactaaacaaagcagataagcacagaccaaaacttggcttagctttcttcctttcggtgttagttctccgtccttatctacccaagtcgtcagctgaaacatcttacttaccttctgatttaccagaagcttctgctacagccttttgacggtcacgtttcatagtgtttgaacgcaattgtccacaagcagcatcgatatctgtaccgtgctcttgacgaacgacacagttaaccccgtttttcttgagcacatcgtagaaggccgccacacgttccttagttgaacgactatattggtcgtgctctgatactgggttgtaaggaatcaagttgatgtatgacaacttacggattttcttagtcaaatcagccaactcttgagcgttttcaggatggtcattgacctcattaagcatgatatactcaaaagttacacgacggttggttgtttggatgtagtactcgatagcttcaaagagtttttcaagtgggaacgagcggttgatacgcatgatgcttgaacgaaggtcattgttaggcgcgtgaagtgatacggcgaggttaacttgaacaccttcgttagcaaattccttaatttttggtgccaaaccagatgttgacactgtaatgtgacgcgctccaatagcaagaccattgtcattgttaatagtacgcaagaaacgaagcacattgtcatagttatcaaatggctcaccgatacccataacaaccacgtggctgacacgttcaccatcgccacggtcatcaaaatatttttgtaccaacatgatttgtgccacaatctcaccagcagtcaagtcacgttgtttcttaatcaaaccactggcacagaaagtacaaccgatgttacatccaacctgagttgtcacacagacagacaaaccgtagtgttgacgcatcaaaacagtctcaatcaacataccatctggcaattcaaaaagatacttaactgtaccatctttagattcttgaacgatacgttgtttcaatgggtttacgcagaaattctcgttcaacttggcaatgaaatctttagaaatgttggtcatttcttcgaaagactgcacacgcttcttgtagagccaatcccaaatttgagtcgcacggaatttcttttcaccgtgttccatagcccaatcaatcaactcatcacgagtaagaccataaatagaaggtttgtagccttccatatcctctaacttctgacgtttacggcgttctggttttgcttgtgttgttacttctgacatagtttaatttcctttttttctgattgtaaaatgctgaccatctgacttggtctgactttgtttcttcgatgaggtgttttgacctttagattttggagcttgcttctgactcttcttgaagttagacttacgctcacggccaccgtcctcggatctagatttaaacttaggacgacgcttgattttctcaaagtttgggccctcttgatccctatctcttcgtttggacttgtctggcttttgcttagcagaagctttttgccccttattcttttgagaagcattgtgctctctatctctagattcctgagaagaatgacgacgattattagaacgacggcgcttgcgacgaggctcagtctcctcttcaaagacaattaattgcggctcttcatttttcaaaataaagtaggcacaaccaaaggcacagtattcacgtaaatactctgacaatcggctaatgcggtctgtcttacgcgtattagggcgctcgtcctcgtaaaatcccttaaggcgaagctggtcattagaccagtccccaacgatataatcatacttgagcatgatttcagaaaaacgttgcccaaagcgggtagcgtctaaagcatccttgtgattttcaagaactgtaaactgacaggcatctgatttcagaagatcagccacatacacaaagtctggccctggatatttattataattaaacatttctggcaagatttctttacgcatgtgccatcctttctgctctctcttattttctatcatgatgctgtaataaagtctctatatcttatcccaattggcaccattttttcctaaatacttggccacaagttcccttaacaaatctggaaaaagaagagtaacttccttttccttaattgtaggaaagtaagaagcaaagtagtactggtccacaaggaccaaactaaacttctcattggaatctacaacccttctattatacaacaaattaccgtttttgtaagcaaaattccccgtgattacttcaccaaatgtcttccctctaaatcccatacctttaatagcttgatttttaaggagttcagccttagtaaaaacttcctgacagatttctttgagctcttgtcctgtcacgactagacgagccatccgcatctgatgaggaagggcttcttgcaggtctgccatggtcacttgaggacccaaagtcttcatgatgagtccagtatttaaaagcgttaattggctatgagtctcctgacaaacagcctgcaaaaccaattgacaggtctcatcaaaatctagttctcgacctagattagctacttttttctgagctaaacgacgatggccttcctcacgcatagccttgataaaggcttcgtcctccttgtctaaatccaagatgtaggacttggtggggatagcctcaatctgacactctatcaattgcccatttttcacagtaaggtcaatacagccaagataataaccatatctgtcagcagctgctaaataggtttcattgactaatttgccctcttcaaaaaggtgatgcgtgtggcttccgatgacaagatttacctgtggataagtctctgcaatctgctcatcataacgtacacctaggtggctaagaacgacgactatatctgcatcccttacctcgggacgagccaaatcctcttccaaccgagccataggctctaacacttgccaaccgttgggagcataggtgatgtaatatgggaaggtataggccaagaaagcaatgtttgtacctgctttagttttgtggataagatagggcttagcccattcaggttgtctcccctcatccttgagatttcctatgatcggctgaaacttagcctgctcataaagacagtctagctcctccttggccagaccaatcccctcattatttccaatagtcgcatagtctatccccaactcattcatcagggctacattaaaacgcccggctgtcgcatcagataagggatgggacttatccacattgtccccaagatctaccttgatcaactctctatctgtctgactcaaatcatccacagctcgcttgagttgtggatactgttcaaaatgagagtgtaaatcattgatatgaagaattcgaatcttgtctttcatgactcctattgtagcacttttgctataaaaaaacttgacaatcattctgccaagtttttacatatctaaattttcttacacctagaagccaatgcttagaagctttgcttcttagctttacgctcagcacgccccttagcacggttagccgcacgacgttcacgtttgcgtttttcgtcaaccttccactgaattttcttcttgtagccaggcttgatttttttctttttcttcttaaccaaaccgatcatttccgtatcaagtttttgataggctttttcacggttggcacgacggtcacggtcataggtatcttgaaactcgccgtccttatagactttagggtcaaaggtaatccccatcttttcaagctcacgaatatcggagtcgtcacttggttgataaagggtaatggctgttcctgacaaaccattacgtcctgtacgccctacacggtgaacaaagaaggacaaatcttgagggatagcatcattgataacatggctaaccccttcaatatcaatcccacgcgctgcaaggtcagtcgctacaatgtactcaaaatcaagcttcttgacttgattcatgatacgcttacgctcacgtggtggaatacctccatgaattttggcaaccttaagaccatttgacactaggtagctgtgcaaatcgtctgcacgttccttggtattaacgaaaatcattgccaaatatggctgcattcccttaagcatctcaagaatctgctcattcttgttgcgccccttggtagataccaaccagttatcaatggtgtctgcaataactgttgaagttttgatttgttccatgactggattggtcaaatatttcttcaagaatggttgcaatttttgaggaatggttgctgagaagaccaaaatttgaacttccttaggcagacttgccgcaatcttgtccacagtatccaagaatcccatgtccatggtcatatcagcttcgtcaacaacaaaggtatgggccttgtggatagccaagtcaccagacttaactaggtcatagatacgccctggtgtcccgataacaatatgaggttgggctacctttagtttctcaatctgacgttgcttgtctgtaccacccacatagttaaccacacgaatttcagtctcagagtgtttggcaatctgttttgtcgcttggtaaatttgtgtcgccaattcacgtgatggcgctgtgataacaacttgaacatcaccactcttcggattgagcttctcaaaaattggcaagaggaaggtatgtgttttccctgaacccgtctttgattcaccaaccaaatcacgacctgaacggactacaggaatcaatttctgctgaacaggtgttggctccttaaacttaatctcgtcaagagcctcctgaataaatgttttaaaattaaaatctttaaatgacatgtttatttacttcttttctatctagtctatccctatcattataacaaaaaaagagcatttctgctcttttcatttatttcataacatttccaagaaccatccaaagggtaatggcacttgcaagcgctccaactgcccaaaggaaagcatcaaccttccactctgaccatttgtcacccttacctgaaagaccacccaattcgaggtgatggtggaatggtgtcatacggaaaatacgacgaccttcaccatacttacgcttagtgtatttgaaatagctgacctgtagcatgacagaagctgtctcaaagacataaaccacaccaatcaagagtagggtccactctacacgtagggcaatagagataaccgcaagcatagctccaagtgacaaggaaccgacatctcccataaagaccttggctggcttgtggttaaagacgaagaagccaagaagtgccccaatcatagtgataatgatagtcaagatagcgaactcacccttgacaaaagcgataattccataggcaatcaagctgataaccacagagatagaagctaaaccatcaataccgtctgtcaagttcacagcatttgagaaaccgacaatccagaataggacaaagagaacataaaagacaccgagatgaatggttaatccaccaatagctaggctatctgtcccactagggagtacgtggataaagtagaaaagcaaacccgcaataatctgcaaggccatcttttgccaaggtttaagtccctcattgatttgacggaaaatcttaaggaaatcatcaaggaagccgatgattccataaatcaaaattacaaagagaatccctactgtagcaccataggcttggtggccctcgctaaagacgtggaagttaaaaatcaagctaaccaagatggcaaccactaggaagactgtccctcccatagttggtgttccagccttagccaaatgctgcttcacatcttcatgcatttgttggccaccgattttcttgattttgtagtaagtaataaagtgaggcatggcgagcaccgtcaacacaaaggcggccacacctgctatcagactcatagtcatcttagtctcctaaagtaatggtaatcttcttggttttagacagggcttttcctgccgcaacactttgtttggtaacagtccctgacttgccacccttataagtaactttaatgcctttccatttggcaaaggtttcaacgttcttcttggtccaaccatacatgtctggaagttctgtgaaatcattggtcatgataagaatctgttcattagccttgatattggctttggcatctacagaaaccttctcaatcttatcaccaacacccagaacaatcggatgaatcaagttttgacgaagggtgttagctgtctcgcccggactcttaccgataatatcgccggtttgatagctcgtttcatcggtctttccaccaccttcagaaacagaggtatcaagcgtatcacccatggacatagcttcttctaggacagggttaaccaccgtcgcataaaaattattatcccaggtcttaggttcctgaactgttacatacataacatattgtggatcatcagaaggaaccatagctacaactgagttgagcgtttcgttggtcccaactttataggttcctgttttttcatcggccacttgggctgttcctgacttaaccgcaacatcatagttaccaaccttaatgattggcgaaccttcagacttgttgtacagggtaccaaactctgggtctgtaccaacagaaatcatataattacgggtctcagaagcagcctgcttggaaactggcttaccaataacttctttcttagccgtacgaacagtgccttggttaacatctgcaacttgtttgataaattgaggttccaacataacaccattgttagagatagctgaaaaagcacgaagcatctgaacctgagtcactgaaatcccttgtccaaaggatgattgcgcaatattcacagagtttcttgagacaacccctgaagattcacctaccatcccaaaacgggttggaagtccaaacttatagagtgataggtagtttgaccaaaccttgtctcccatctcttgttccaacatggtcatcaaaacgttacttgaataagagaagccttgagcaaatgacatggttcggcctgacgagataccttcattaatagaccagtcattgatttcaacatcatcaaccttgataccgttggcattgctataggtcgcattaggattgaaacttccgttattgatagccgatgacaagagcatgaccttcatggttgaccctggttcatattgggcctcataaagtcggttaacccagtcataacttttcttggcttgtccttcgagggtatcagagttataggtaggacgttgtgtcgtcgcaagaatttcacctgtttttgcattgacaactgtcgctgaagcattgacaccttgcgtctgctccataaaggtatccatctgcgtttctaagaaggtttggagaggcgctgacaaggttgtatagatgttcttaccatcgatagcttccttggtaatggtttccgtacctagaagcgtattaccgtttttatccttttcatagatggcctctccatctgttccagtcaagaggctattgagcgagcgctccaaaccagtttgaccaattaaagaatatgagccgtcttttttattttcaacagcttcggcacgaccaagaaactctgacgcgaaggttccattagggtacattcgtgacgttgttgcttcaaaggccatccccttaattcccgcatctttaaaggctttttctagttcttctttaacagagtaggtaattcccttcccctttagcccaaaggaaacctggtaggcacccttagtacgcaattgggccaaggaatcactcttttcaattcctagcttatcctttaaaatatcagcaaccttgtcaaactgactatcttggacatagagtttttcttgagtcgctgacacataactggtcgacacgatagcgtaaatggcataactggttgaatcctcagccaaaacatttccatttcggtcgtaaatcgtcccacgcttggcagccaccgtggtcttagtgttataagatttagcagcctgggtagacaaatcgacaccaaacttactgtctgtcccgataatcaccacaaagttgataataaagacgaaaaagataaagatgctgagaaccataaggttctgaccaacgtgctgtcgattctgggctggctttcgcctatccctaacgacatagtttagaaataaatgtttaagttttcttaatctgttcattggttacttcacactcttaatactatcgttattaatagacaggcctgccttattagcaatctctttaatacggtcagagtttgtcaactcattaaccgcctgctttgcattattaagctctgttttttcatcactaatcttgctattaaggtctgtgatttgttgcttgatagcctgattacgcccttgtaaaaatacaactgcaatactcatcacaatagctgtcaaaacaattgccgaatagaaggccttttccatacgcgtcataaaacgaatatggtttctaatggctctattaacaatctgatgttccttattttccataattatttcctaatttttttagccacacgcaatttagcagaatgcgagcggttattagcttctaattcttcctgactaggtaggattggcttacgattaactaaggctaccttaggttggaggtcttcaggaataaagggtagacctttaggcacatctaccgtactagcttccttgaaaagctgtttagtcaatcgatcctccaaagaatggaaggtaatgaccgaaatacgaccatctacagcaagtaaatccaaggcctcttgaatagactcatccgcagcaccaagctcatcgttcacttcgatacgaatagcttggaaaatttgcttggctggatggcccttcttcttcaattccttagcaggcttagctgatttaatgatttccgccagttccgtcgtggtctcaattggtttaacctgacgagcctgttcaatcttacgtgcaatctgtttagagaacttgtcctcaccatacttgaagaaaatacgcaccaaatcgttgtaaggataggtattgaccacatcgtaagcagtcagactcgcctcctcattcatgcgcatatccagcttggcatcctgtttataggagaaaccacgctcacgctcatccaactgtgggctagagacacccaagtcatagagaatgccatcaatttcagacacccccaaggcttcaagattggacttgagattacggaaattatccttgatgaaagtcaccatgcccttatcaatatagtccttgagacgcacttgagcattatcaatagccttttggtcctgatcaaaacagtacaaatgacccttttcagacaattgcgacaaaagataagacgaatgtcctgcgccacccaaggtcgcatctacatagatgccatcgggcttgatatcaagcatatcaacagtttcgtgtaaaagaacggttacatggtgaaattcattagtcataacttttattatagcacaagaatggagaaattgtctcgttctgtaagttgacaggatagtaaaaaagccagacctgtggtctaactctttagttgatatatcatctgataagattaatccactctgtaaaaatagctttcctcagatggcactccattcgtcgctagaatacggtccttactattatctcccgcatcacttgcatcactaactcccttaggacaaggctgaattggagtattcccaactggactagaatcaacataagttaaggtatatataccagacacatactgattggatgagactttgtcgataaggtaagtagacccccagagttccaactgtccatccgaagtgatggtgatggtctttccatttgaagatttccatgtccctacagctgatttgtaattgccatttttgaattcatcaggcttgaaggatgatgaatttgtttgaatttgtgacgatgttctaaagttagtattagtttaggtccttccaatcccaattagtaagatcaacctcatctgcacccgaatcactgtcctctttttcaagagactgaccatcactactaaatcgatagccagcacctccaccagtcatagcaccagcactaccatagtagctaaaggtgttatccatgaggtaggccaatgtcatacgctcacccagcatgcccagttgtggaccttctgtcagacgaatcacctgaccactatccttagagatagtgtaaatatccgtaatcatatgttctttaaaaagtttccccggcttaaaagcaagaatcaactcatcaacaccattaccatccaaatcacggtaagtatagaccgttgaggcaggacttgtttgagaattagcataggtaacaacaagagaattaagcgaggcatccgtttgattgttggccacagccgtttggtacttactaatgatgctatcataggcagaggtatctacctttttctcttgactagagctttcactactacttgattgtgactgttctactgatgaatatgaagtcgtcgaagtcaagccattttgctggtttgaacaagcggctaataggactaaactagataatcctgttactaatactaaaactttatttttcatttctaatcctaaattccttttctctaacccttattctgttgtcccagagctaacatctgcgctgtaggcaggtgctgtatagcttgaagcatcactatgtgactctgtataagttgttggtggcacataattatattggggtgcttgataagtctcttgtgctgaagatggtgttggcgttgatgctaccgcaggagttgaacttgcttctgtctgactagctgcttctaccgttgagcttgatgatgacgattcacttgaagactcacttgaggttgaagaagatgacgaagaacttgagctcgatgacttagatgaagacttgggtttactagacgatgactgcttagtggctaccttgacttggacctttgcatgattgtgtgcaggttgcaaaaagacaatagccagagccaataggatagccggtagggtaaatgccaaaataaggtaacgtttttcttttaaatgacgaagtagtttcatagagtattcacatttcttaaatatatttttagtatcgattagtctcagataagattatatcagaaatattaaaatgtgcaacattaacataaaacttttttaacatcaaaaaaaaacaactcaaagagttggttgattgccattattgttgtggattattgaagttgttgactggcacttctacttttgttggttgacatagtagaaaaatgaagataaaaataccgacaaagggaattaaaggaataaaaatatacggccaattatagccagcatcacgcaaacgacgaacagttatagcaaggccaggtaaaactgtagcaataccataggcaaaaaagatgagtagtaaaataactgaaatagtaaatacatccattgaccctgttgcagataccattctttcaaacactgcatcgagcaaataataagcaaagaaaatcaatacatgtgccaaatatgcaaaccagtaatctgaaggtgttgaacggcccgtaaaatcaacatagcccttccaaaattttttgtaggcttcaatcataataaaatccccctttttatgttactctcagtataacaagagaagagaagcttgacaaatcaactaaaaaacagccatactaggctgttaagtcgttattattgctgtggattattgaagttgttaaatggatactcaactttagttggtttacatagtaaaacaatgaagataataggacctacaaatggaataaatgtaacaaaaatatacggccaattgtagccagcatcacgtaaacggcgaactgttacagcaagaccaggtaagatggcagcaacaccaaaggcaaaaaagataaataggatgatgaatgaaataacagcaaaaaagcttgattctgtagcacctgcaatgcctccaaagattgccagcaacacataaaaagcaataactgttaacatatttgccaaatatgcaaaccagtaatctgaacgtgttgaacggccttcaaaatctacatagcccttccaaaacttcttataagcttcgatcataataaaatctcctcattttttgatacttatagtatagcaataaaaaaagaatttgacaaatcaactaaaaaacaacctaaggaggctgttaagtaactatcattgctgaagattattaaaattgttgaaaggaaattctacttttgtgggttgacaacacaaaaccaacagtacgatatcacctataacaggcgcatagcgtaagaaaatcaatgcccagtgaaaaccggcatcacgtaagcgacgcacctgaagggcaatagatggaatatagttagcaaaacaatatagcattgcaaacccatacagtaagctgagaataacatgataatgactattcggactatcaaaaacacttacaactataactatgctaaataaaatgatacctacaatagtattcgctaaaactgccaaccaatagtctgagcgagttgaacgtcctgtaaaatcgacatagcccatccaatactttttataagctctaaacatggcaaaagctcctcatttttgatacccccagtatagcaaaaactttatactctagcaaatagaccaaaaaagccccatcatggggcttcattgtttattctctaatttgtccttgtccgttaatatagaacttggttgacgttagggcctccagtcccattgggccacgggcgtgcattttttgagttgagattccgatttcagcccccaatccaaagacgaagccgtctgtgaaacgggttgaggcattgacatagaccgctgcagcgtctacatcatcttggaattgctccgcacgactgatatcctgagtcacgatagcctctgaatgcgatgtcgtgtaagtattaatccaatcaatggcctcatcaaggctgtctaccactttaacagacataatatagtcaagaaactctgtcgcaaaatcttctggtgaagctggtacagctttttccatgagtttcagagccgtttcatctgcacggaactcaacagcttgaacttttgaaatagctttttccaagttaggcaagaagtcttccgcaatatcagcatgaacgacgagagattctgcagcattacaaacacttggtcgctgtgttttggcattgatgacaatctgtgtcgccatctctaagttagcatatttatccacataaatatgacagttaccaacacccgtttcgatgacaggaaccttggctttttctttaaccgtttggatgagacgggctccaccacgagggatgagcaagtcaacatacttggtcgccgccatgagttcctctgctacctcatgagaggtatcttcaaccagctgaacggcatctgctgtgatacccgcatttcccaaagccttacgggctactgtaaccaaggccttgttggaattgatggcatcacgtcctcctcggagaatgatagcattattggttttaaaggcaaggctaaaggcatcgattgagacattgggacggctctcaaaaatcatagcgataacacccataggaacacgcttttgaacgattttgagaccatccagattcgtatagccacgaaccacttgaccaattggatcctgaaggtctgccacctgacgaacaccctcagcaatccctgcgatacggtcttccgttaagagcaagcggtcttgcataatctctgaaataccattttccttggcatttgccatatccttagcattttcagtgataatataggcactctcagctactagagctttagctacctgatttagaaggtcgtttttagctgctgttgataatttagcaatctgacgacctgccaccttggcctgttggcccagtatatcgatatatgtcatcttagtcctcctgtttaaagagtgtaccaatcttggctccttctaggacacgaaggatgtcgcgtggattttcaccattcatcaaaaccatttggctatgattttcaaaaaccatctgggcggatttaatcttactcatcataccacccgtaccaaatttactaccagcaccaccagctgaggccagaatttcctcggtaatctctgggacatagctacgaagggttgcatcctcatagacatttgggttcttatcaaagagcccatcaatatctgacagcatgatgagtaggtctgcaccaacaatcttagcaacgatagcagacaggcggtcattgtctccaaacttagtcgcatgatccatttcatctacgctgacagcgtcattttcattaacaactgggacaaccccaagctcgaagaggctctcaaaggcattgatggcattggccaaactctcgggatactcaaccacatcacgcgtcaaaagcaattgagataccttggtttgataatgtgaaaagacctgagaataaaggctcatcatagccacctgccctacacttgagacagcctgttgcttaccgacttcagccggtcgcttgtctaggtctaggacattgagcccgaagcccatggcaccagaagatacgaggacaacctcaatccctttattatgcaggctagaaatgacaaaagctaattgatcgattttttcaagattaattttccctgatggcaaaaccagagagctagtcccgattttgataaccaggcgttttactgagtcaaaatttcgtttcatgtttatgattatacactaaattcaggtattttaacatatataatgcataagtttacatattaaggattttcagtaaaaaagaatccctccaatcggagagactctttaaacagtttgttctaggcaaaaaacatggctctaatacgtttccaacgtctgcgatcaacaaagagataaacgattaggacaactaaagctataagcccagatactatagcattaactactagggcaatccagaacttacttgcaaagaagacaatacctcctagcaaggcagcgatgaaaattgtaagaataaagatacccatatagagccactgtccgccacctcgattgaagagctgggtaacttcctgccaattcacttccaacaatttaaggtcacgttcaaagtaatagccacctacaagataggttgttacgagaaaaccaagagtgaaacttgccaccaaaataagatggagatgagccaagaatattaaaccaagtcctcctaataagagggaaacaccgacttgcaagctatagaaaagccaaaacttttgacgaagatagtcacccgtattgattggtaggctacgaataaagtcaaagtttgtcccctctaaggatgttgctacaccaagaaaacttgttggttgagctgaaaagaaaccaaaggcaattccgaccaaaagcaggagtccgaaatagtctgggcccagatctttcaaaaataccgcacccccacctaacatgatcatatataagaccggcaccacataggtattgataatgagagttgaattccccaaagtagataaatgatggcggatcaagacctgtctttggcttcgagtaacagctttggcctgaggctttctagccttttggttataaatggcttcgtggaaataacgaggcattctgactttataaaaccaatagcccaagataagcactacaaccaggggaagatagaaatttagcagagcctctggagatagaggggcagctacgacatcatagtaacctcttagataaggaaccaagggaaaatcggcatgtccagcaccatcaacataacctttaataaaaccgaccatcataataggcaacataatcaatagggttgacaaggtcatcaaaatggttgaatagagctttttatgagaactgcgaacaatcagcgttccaatactattagacagaatcactgaaaaaacaagattgataaagagagaaacgataaaggtcagaagcccaacgactatccccaatgggccaataaattgccagtaagctagaatgagaagactaaggataggtaccatgaaggtcatcccaaccatagagcctgacaaggtcttggccaaaaaaacttccgctggcttcaagggaagaggcagataagccttgctatccttactgtcataaaaggtactatagagagccgtaaaggtctggagaagccccatgattgaaaaagtcaagagatatagggttaggactccaggattggccttataatcgacacctacaaaaagatagctatagacaaccgtaaaaacaactagaatcaagagttgttgtctaagcatggcattaacgatggagaaattggcttttttctttttctcctgacgtttctgtaggttagttactgcttgaggattagcgtagaggagattgattttaaaaagctcccaaacatggttccagttcatgactatacctcctcaatcttacgtccagccatttccagataaatagtttccaaatccttgtcagggtactgagacttcagttcagctagagacccttggaagataagttttcctttcttcaaaatagcaatccgatcacagagctgctcagctacacttaaaacgtgagttgagaaaaggacactattaccttccttggcatgatgacgcatggcttccttcaaatcataagacgcctgtggatccagaccagtcagaggctcatccaaaacccaaatctgtggattaaccaaaagggcaccgataacaacaaccttctgacgcataccatgagagaaggaagaaataaggttataacgactttccgttaggtcaaaggtagccatgagattagtcaaacgttcctcgacttgactagcttccaaatcatagatacgtgtcaagaagtaccaatagtcattggcagtcaaatttaggaataggtccggtgaatctggcacataagcgatttttttcttgatagcatcacgatgttgactgagggccatatcatcgacgtaaacttcaccgtagctagcttcaatgatagacgtcaaaatggaaatggttgtggtcttaccagctccattatgaccaatcagcccaaaaatctccccatctcgaatctcgaggttaagatctgagagagcatctttatcttcataacgtttcgttacgtgttcaaaacgaatcatcttttatcctttcttgagaatctatttaacaacagtctcattttacactttatattagattataaattagagttattaccttgtttttttatgaacaatactctaataatatcggcaatagatttagataaggctatttcgttaccttctcatttattgtatcatttcaaaggtacaatttcaagaaaacgtttgtaaaaacaagacaattttgcattcggtctttgataatgctaaacttatagtatttaaaacaaataggaggaaaatcacaagtgccaactggaattatcatcaactcgctatctattattttaggaggaatcgctggaggtctcttcggggactatctcagagacgatttcaaggaaaatcttaaccttatctttggcctagcctctatggttatggggattagtgctattatgaatatggttaacatgcctgcggttatctttgcagtagttatcggtaccattattggactggccctaaagtttggaaaccttatcaacaagggggctggacttatggaaaaaggcttgtccaagattacaccaagtaagcaaacaggactggcccacgatgaattttatgcacagctcttgacagtaatcgtcctcttttgtgcgagtggtacaggaatttacgggagtcttgagtctgggatgacaggcgatgcttcaatcttgatttccaaatctatcctagatttctttacggccatgattttctcttgtagtctaggctatatcgtctccatgattgccattccacaatttatcatcttcttccttctctttgtgagtgctggtttcattcttcctctaacaacaaaagctatgattggtgactttaaggcttgtgggggctttctcatgattgcgactggttttcgtattatgaaactgcgtcaattcccaacagcagatatgattccagccatgattctggttatgcctatttcctgggcctgggtcaattgggtagtccctttgattagttgatattaggattaaactaaacaaataccgtcagtctaatgctggcggtttttgtctctatttattgctgttatggactctaactattaaaaaactagtaatgtttatggtgtttaattctaatttttctaaccttgtttagactaagatgagtttgctataataaactttgtaggcctaagcaacctacaagatactttttttcataactatttccatcctctaatattttaacgaacttacaatactgatggaaatctatcagaaaagaccggtgtgcacacaccagtcttttttggtggggttaagacacaaaaaaccactctttcactatgaaagaatggttatgttatagcttatacttctacgacttccaagttttttccacctaggagaataagatatttgtcaatcttttccatttgataggcttgactgagggctttagcatagaggctcatttgccccttgtagcgttccttaagctcaccaggttgagtgaagcggtctgtcttatagtcaaagaggacaatacggtcttcaagaagaaggtagccatcgataataccacggacgacaaagtcttctttactagcgggatcttctgccaacatggcaaatggcgcttcgcgacgcaacttatcacggttagctagaatgagctttccaagttcggtgtcaaaaaagcctagtagcttttctaactgcacacgcgccttgacttgatcatctgccgatactcgactcaaggcctgtgtcaaatcttggagggtcaccttgtcagaaagactcaagcgttgcatgagttcatgggtggctgaaccaactgcagctccagtgaccttcgttttttgcccaaaatctggaagctcaaagctagtggatgtctcaagaggttgcacctcctctttcttgtccataatatccaccccttcggtatccatgacaggttcgtagaaggctttgagctggctgggcgtacgcacagatggcaggtcaatcgctggtgcataaagttggttgagtttttcaacactttctaagaccgttagggcacgcttaatgtcttccgtctggcgattgttagatagatcatcagcatctactgccgcttgaacttcaacctgaccaatagcctctggagtcaactcctcagcctcaacaaagcgaacagtaaacttgagatcctttctcataaaggcagtatccaaagccataacccaatcctgataagtagcgatttggtcacgtagagctactggtaggcgattattttcaacatccgtgccaaattgctgggtcaatttctccttactgcccttaccaactaggtagagttttttctctgcacgggtcattgcaacatagagcagacgcatctcttctgagatacttgctcgacgctcttccctacgattttcttggaaggttaaggtctcgagaacaacatttaacttaggcaaattagtgtttacctggtctttgaggtcagctagatacttaatgccaagtcctttttcacggttgataatatacttaccacttaggccatccttgctgtgaccaataaacttgcgattcatctgcaagacaaagacatacttgaactctagtcccttggacttgtgaatagtcataaggctaacggcatttttgggaaccaagtctgtcacttcctctaggtcgttaccgctagaaatgatcttatcaatcatgccaataaaacgggaaagtcccttaaagccagtcttttcataggcattggcacgcaaggcaagggcgtagagattggcctgacgttgctcagctcgtggaagactgccaacataatcataatagaaacgatcgtcgtaaatcttccagatgaggtcatagagcgagtgccacttactgtaagcacgccaatctgccagagtttcaatgaagagagtcaactttgcctcaagtccttgggtgacaacttctggatgaagtcctgatttagtatgagatgcaagaagcttgtcatagaattgtcctttgtcagcctgaacagcaatccgagccaggtcgtcctcgttgaagttaaacataggtgaacgaaggagggcaaccaaggcgtagtcattgagaggattattgatggcacgaagggtgtccaacataatcataacttctagtgactctaggtagcttgacttgtactcatcaggaaccaagggaattccgtgctcctcaaagcttgccatcaagtccagataggtgttgcgagttggtgctaggagggtaatatcctcaaaacgtacaccctgctcgtgaagtttgatgatttctttgataaccaaggaaatctcgccgctactaataggttgatcagcaccttcttcgtcaggagtcacactcgcttcatcactattgtaaatcagaacctctgtctcattttcaggatggggttctttttgcttctggctacccgctaccagcatgtgagtcttgtcatagaggatatccccgatttcctggtccatgaggtggctgaaaacaccattagtcgcatcaagaacttcagattgactacgaaaattctctttaaggagaatcagcttacctgcatctggattttcaaggaaaagctggaacttgccattaaaaatctgagggtctgcctgacggaaacgatagatggattgcttgatatctcccaccatgaatcggttgtggccattagagaggagctccaacatgcgttcttgggtatggctattgtcctgatactcatctaccatcacttcatggtaacggtcacggtagctagctgccacctctggattatcctccaaaatacggatagcaaaatgggcaatatctgagaattcaaaagcattttcctgaatctttgcctgtaaatactggtctgaaaaatcaagaacaaaggcctgaagcagctctaacagaggtaggatatcagcattatgcttggtcaaaacctcgaggaccgttagttgggtatcaacctctcgcaactgggccacaaactcatttttagtcttgttataagcctccttataggccttgagttcctcgtctttgggacgggtcatattggtcaaaccagtccctcctgacaaagtcaagagttgtttgagcaggtcctccatatccgtttggtcattggccaaggctccttcaagaaggctaatggcatccgacacattattaagatacttagccttggcaaattcacgctgagctaggcctagatggtctcttaagaaggctaagaaatcagccaacaagccatctttgagaccctctaaaagctcagctttaaccttgtctggattggcctctgcctgcccttttaaaagattttgacgtagccatttttcaggacctgcagtagcctgagaaaagttatagacatcgtaaactaaatcacgaaaagccttactagtcttgccatttcctgcgaagttgcggaccaatttttggaaaagttgggcatcctttccttgcatgtaatcgttgaaaagatcggcataaacctcatttttcataagtgtctgctcggcaggatctgtcataatgcggaaaataggtgacacccccaggagatagccatactgattgaccaatttctgggtaaaggcatccatagttccaatatcagccgttccaatcttggcaatctgatctgaaagaaaggcacgctcttcatccgtctcaacttgtccaagttgctctgtcagacgcttttccagacgctcttttaactcacccgcagcctttaccgtaaaggttgagataaagagttggtcaatgccaacgccacgtccaatcatatcaaggatacgctcaaccatgacaaaggtttttcctgatccagccgaagctgacacaagaatattgctaccattactgtaaatggcctcaatctgctcaggtgttaacttgcgttccttgtcagaagctgcttcttgggcaatacgttccttaatctctgttggattcaaaaaagctttagtcaacatggttgtcctcctggtcttttttgtctgctgtcacagcttgatcagtgactagaaaggggacgattttttcagcaacttgcatctcattatagtcctcatcttttgccatcagctccaaataagcttccttcttgcccttacttggtaaacgcaggagctttcgagcctgtcccatgtggcggtcggcctcaaaatgagtaattgccttgatttgatccccttgaacagacttgccatcctcggtataaggattaaccgcaaaattcccgcttcgaataacttcagcagcacttgtaaagagcttgatattgtagtctagcaagttttctaggtcctccttgtcataggtgacagtcttttgtaaatcatagtttccaccagccagatgctctgtttctgaagccacaaaaagtcccttataggtcaattccttatgagcctgagctgctagcttatccagaccaaactgagctaagctaagctgtgggtcctgcatgtgaagatacatggcaccaaaaagctgatcagcatcaaccttataggtctggcggagggcttctagataggttaccaactgcggactgaggccattgtagaatttctgaatgtcaaagacatttttacctgatttgtagtcaacgacacccagagccccatccgttaaacggtccacacggtcaataatccctgtaatcttgatgcaatttgctaaaagtaaatcaaacttggcttcctcacgctcaaccttaacagccgcattatcacgcaaaacactggcagttgaacgagcgatatcttccaaaatctgacgagacaggcgactctcttggtcctctgtatagagaagttcaaagggttgttcctgattggtctgagcaatagccttttccaatttatcatcgaagttttctggcgaagaatcccccataacacgctcaaagacacggtgcaagtaagtcccatggtgtcgagcatctggatggatggactccaactcttcaagccccaaaacataacgcaaaaaataaagatattggttgttatagaaggtcgtcagagccgaggctgataatttcagtggttcttcccccggaaagaccagctgcatgacctgatcatcaaccttggtcgtcgtcacatcgtcaatcacatttggaatcaagacttggtccttatcaagtcgcttacggagataacgcacagcaactgaccagaacgtctgggtttccttatccaaatcagcatctagctggctgctgttaagggcaatgacagttgatagaaggtccttgtagttcccaatctggtcacccttggcctcgaaacgattacgtcccttttcaaccaaagaaagaccaaggtcaagcagttccttcaaataaaccgacatgtcatcttgagtctcattgagaatttgtggctgactaagcaccaattgttcactagccgcattaaaaagtgacatagccacgaaatgcccccgctgactattgctctgcgtaacaatatccaaactccggtgttcatccgtagcttcattgatacgactacgttcctcgtcagacaggagactcttattttgccctacctttggaaaatgcgactgggtcatgcccaaggcaaaaacataaggagctgaatgtggctgaatcaaatcgtatttcttcacattgaccacatcgactgtagctggcaccgtacggtaatcacaggccaacatgcccgaacgcaaaatggacaaaaagtcgtctactgctagtgtttcttccccaaagattgtctcaacctgctccaagagttgtgtgaaagccttccagacctgttcgttctgttctttttcggcctcactggccttggcagtcaaactagccatttggcttggcacttgcacagcctctaaaaagaccacaagtttcttgagtagactagatcccttttgtttgcgactattaatcaacttgtccaagggctctacaagctgtaaccttaagtcattaagctggtctaaatcatacttatcacgactattggccgtaaaatcagacaagaacttgtgacgccccttgatgtctgcaaaattgacataatactcaaaaagatctaaatcctcttgagcaaaaccgccatagagaccggattttacgagattaagcaaatcctcagcacgataattatagcgcttgatacgttccagcgaatccacaaactgcaccaaaggatggctagacatggtttcttccttaccgaaataatagggaatatcaaattttcggaaaatctgccccacctgaagcttataactctcctcatcaccaagcaggaccaagatatccttatagcgcttgccatctgctagtaactgacgaatactcttggcaacctgagccacctcttccttttggttgaccacttcccatacctgcaaggcttgcttgtcctgagcagttagctgctcatctaccgtactaaaatcatgacggctctccaaaagacgactaatgcgcgcaaaagaaggattgccctctttgtctgtcgtcacatagtcgggtgtcaccttataggtctgagccaaagttctcaaaaaatccactgaggcctgataaacattgccataaacaaagttagccctataagctttttgactggcataagtcccaatgacaatctggtggcacttatcattcaagagagcaactagggcctcctcctcggcagagaaacgcgtaaagccatcaatgaccaaaaccgtgttacccagtgccttatccagatgtcctgaggtaatttccttgaagaaggcactaagttttgattgattatcaaaatctcctgccaacaagagatcctgagccgcactgaaaatcctgagcaaatcctcttgcttttcaacctgatccagatgctgcaaatccagaaccgtcatattagcctgctgcaactctttgtaaaggtctaccaattgattaataaagttactatccttgcgcaagcggccgtaaaccttaagctcatcatcgcccatatgcgacaacaccttataaaaaatcatggccagaccagtatcatccagctgagttttggggttgctcgtattgagaatgaaatatctcgccatctgagtaaaacgagtcaccgtaatctcaaaggatgctgactgaggcaggtattccaagaccttacgctccttctcaaatgacagggcattaggggcaatataaaagaccctctttcccttttgagcatagctggttgcctgctccgtcagaatttctgttaaatcctgagacatatccgtataaagtaatttcataagacgtccctttcttgtctctaaaccagttgttaggctaagcaataattgccattcatttagtgctaacaaccactaatccttgctattataacacagaatgaagcaacaatcagactcctccctcacccctttctcctccgatgtcctaagttgtagacataagcacaagcaccacagcaaagagccctcctttatggacttgtacctaaaaaaagagccaaatcctctgatttagctctacatctttatttaaaaatcaattcctgtttgaagaggtaatcaccactgcttgtaatcaaattggcatcactatacttcctaagaatatccttggctgagtggaggttaagacctgaggtcttcttctggttttcttcctgcataatggcatcaaggtcaactttttcttctcgcgtcctattttccatgacgaaatggtagcttccatccttatcatgtcgatgaaaactaaacttgatttgactggcagggacctgcttactctcatcaatcgcattactaaagaaaatggacaccagcaaggtcaagtcaaccacgttcatggtaaaccctgaaatctcctcaggaatatcacaagtcactgggatattactacgtttagcctccatcatacgagccgaaagaaggctacgtaagggtaaggactgaatattttccagcttaggattatcaatgacacggaaacgttcaaactccttggcgctctccctaagaacattctgatacacctgttcagcgagagcctcctcctggtcacgcacttcctctgaaaattgctccacaaccgtctgataagactgtctgtattgtaacaactcattgtagagaagatcaatcttttggttggccttggtcaaactattcaaatgcctcttttcctccatggccaaactctcttccaaatactgccgagacagttgattaagatgggcaattagaaaaatgaaagccactgcggacaagagaacccaaagcatccgaagtctcaactccacctctgaagagtagccagggaaccaactgtctaaattcacactgagatagattcccaataaataaatggccattgctatagcaactcttctagaaatctggaggttctggaaagagtcatcgctatagaccttccaacgcttcaaatccaagcccaagaaacggtcaaatacaaaataaagtggcaaaatcaaaccgtaagataagagatagaaaagagcattggaccctacctcagcgacggggagatttaagagaaggggaataaagaagagtcccaataagcgataaagtaaatctgacgtcaccactggaaacaaagtatgaaaagcatactgggtcaccgaccaggtcttccctttagcaagaaaggccaaaatcatcaggataaagacatcaaaaaccataatcatgttagtaatattatactgaatgactacatctaacagggctaaggtcaaaaagaccgtccaggagatacgaatgtctgtcattcgtttgaaaatggcacaatttatcgtcagagttaaaataagctgaatggctagaaaggcatctgtatcatagagatttaaaaaatttattcccaaaaacgattcaaacatcgaatctcctttctatattttttttacaagtctttagtattcaaattgctgtctatagatgaacttatcattcttaaagctaagtttagactgagggtaacgctccataatatcttcgagctgctcattgattgataagtgattctcatacgcctcgtggggcgcctcggcactatcttgcgaaagggttgtctctacagagaggacctggacctcacctctttggtaataagacatacgaactaaactattttcttgaccatgagctctcaacaaggcattgtccaagaaggtcgttagaacagctgataaatccaccacatcgatatgaactggggatatagggtctggaacctccatgataaaatcaacgccaacagcatgaaactccatatacttactctcaatgacggaacgtaacaattgagaaagcaggttagaaatatctggcataaccttgctgaagggaacttcctcctcagataagttctgagtgtctccctcttgactagtagccagaactgtctcaaccttcttaggtacgactaccttaggcactccatcacggtatagatcctgatagagatggaggatatgtctactagattcctgtaagctctggaaatgacgctcctgctcctctttcaactccagaaaaagttcatccttaatccactggttagcataggaaacaacaatgaagaaggctcctgttgctaatagaacgatcaacttagcataattgttaaccacttccacaggccagatgctagcaaagtaaggcatgaaatcatttagaagcccgtatgaaagaaaggcaaaactaaccccaataacaataggggtgaagtgaatgcgtaagcgctccttttcctcgacctgcaaatattcataaccaataaaacggtgaaccaaaagataaagaggataggtaactaccacacatataaactccgttaaaaattctggaatacggctcatcaagtcggctcccaaaagtaaaggaaagacgattaatgacaagcctcgtataatgatattggttgttccccaggcataaaaactattaaataccggctctatccatggcaagtctggacgtttgtaataactaaaacaaaataaaatgagaggattaagtaaaaatttgaatcccataggaagaagaggagtcaaaacaactgacaaaaggccacctaataaaagtagccaccaagaaatcttgaccctaccagctgcatgaaacatcagataattgacaaagaaaatcaagagcatgtctatagatactagccaatgaaaatctttaaaaacagcaagtagcgattcaataatagaagtcattcttttccccctctccctttaatctgatttaagaaacttcctcaaaaatcccctaggaagccctttttacaacactactcattatatagctttttgtaagttttcacaataattaattttctattaaggtctataatacctctaagaatccatttatttatagaagatagacttactattaaattaaagttacaaatgtaacataaaaagttgagacaattttatctcaactttttcattaaagacatattcttttagaaactttctttaggtgactaggaacctctgcgaccttcttcgaatttccaagacttttttttaaacctaaggtctagtcagccttgtagtagaattgtttggcgtcagattgtggtgatgctgactgggtaatcaaaatacggtctttagtattatccgaaccatccacaaatccctgtactgtcggaagcgttactcccttaggaataaagacaatcgctgctccggtaattcccatccttaaacttgatgtgagatagccattctcaagttttccatttgtattttcaacaacataattctcaggagctgttaaattgtccttagaaaaattcagacttaagccattcccattcttccaagtcccttcgaggctttggaagttattatccttgatagcattaacatccatgcctgtttgttcggtcttggtttccgtttttgattctgttttagtctctgatgaacttgatgatgactccgatgtttgtgaagaacttgaagattctgagctttcagatgtgctagcactagagtaatgcttgagcaactcttggtaagcctcttgcatatcatctggtgctaccttataggtctgaacagccttcttatcgtaattacccttccagtagttcgtcacataataaacagtaccattagaacctagaacgatttggtaagaatccttatcttggtcaaccaaatccttataaagcttgttgtagccattataattgccaccagttttatcatcagctgaaaagtccttaaagagggctttttgttcagcggcatcgtcttcatacatagcatgtttcttatccttcaaggtataaagacggaaagatgatgttgggctatagtctgcggtcttaccactattgtcattaatccctaaagcaaaggaatcaaccgtgtttttatagtccttgaaatcatagtttgagacttccttaccattgatgataccactcggaacaccagtaatatgttcatagccatccgcattgatgagattagcaaggatggtaatcgtttggctgctatctttttccttaggtgccttaaatgaaaggaaggttggactaccatcattgaccttagtgatactgtcaaagctactttgaactaaaacagcatccttggcataatcagactgatagagccatttcccaaaagcttccgtgatagacttaatgtcctcagtcgaatagtctgcaatataagtggtttccttatcaccattgacatcggtcttagtcttgatatctgcatttggcttatttggatcgttagaagacgactctgagcttgcgtcgctaccagaggatgaactacttgattccaaaatatccttaataatgcttttaacttggctacttgaagaactagacgaagcctcgctagactcaacgacttcagaacctccctcaacctgagtataggtgtttgagtcagtcatttcaacctttgcatctcctccaggcaccatacttggtgtgatacggatagtaccgtctgagttgccgttagttccagccaacttaaagctcaaagaacggtcttcgccggcttgggcattagcctgataagtatcacctgtctccgtatttttgacttcgtatttgtctcccttgattttacgaacttcaaaacgcaccttgttcccagtattcttatcgacaacggttgtggcataaactcttgaagacgatgtgaaagccgtgctctgagtgtattttccaagtaccatgaagaccaaaaagacaagcaaggccaaaccgataaactttttatgtttaaactgtttcatgaggtcctcctagataaatagatagccaacaacatagccaaagagggcgatacaaatcaagagcaaaatttccaaaactaaaaaccagctaaacttgagatctcccaaaccaaccttagacaagacttgtctgaatttagaatttttctgtctgctcaaaccactagaaagagcaaaaccagtcttagcagcttcggcaacttccttatcacttggcttgcgaccatactgcacttggaagtcaatcagccattcatcatattgttgcatttatttctccttcttctgaagtgtgacgaaaaagagtagggcataaactaggcaatgaagtaccaaagcccaccattggccccagaattcacctgtagacccttgaaaggcctccaactggctcttaggaacagggaccctgtacttagccaagctagatggcaagtctgacaagtcactagaaatcccaaaaagcttgtgcccataacctagatagataaatttttgtacccaatcaatggcttttggcaaagataggatagttcctgacaatgaaaattgcatgatccccacaacaactgctaggataacagaggtaatctcagatttgccaaccaaggctgagataaaaagggcaatgaaatgcgaagccaagaaaaccagaagcactgtaatcccaacttcccaacggtaggaaccaaaaatatgaccagcgtctggaaattctttgtcaaagaacttactaaaaacagagtaagataggataaagacaatagtttccaaaacagcaaagaaggcgtgaatccccatactagccaaggcaaaggccgaacgactcaaacctgagaaaaagtcacggttgaggactgagcgttccttagaaatataaatactgttttgaaccacaatcaagagactggttgagaaaagcaagagaaagagggtcattcgagttgtttcgaaatctttcaaaaatcccttgtcttgaatatagaggattaagccttcgaaagcgacaatgcccagaagaaccttaacaaaatccatgtagtggtgtttaaatttataccaacttaatcgtaatgctgcgttcataagtctccctaaatcttgtaaatacgtgttgaagcattgagctcttggtagacatctgcgatattcatatccatatatttacgaatcatataaggatcgctagtcttgtattccaaaagcaactcttcataggtccctgcaaatgtcggacgtcccttggacaagaagataatcttgtcaaaaatagccaaattttctgtgttgtgggtaataaccacaatagacttgttagctgatttagccaaaattttcaaggtacgtaagagattacggtcactaagagcatccaagcctgaagacggctcatcaaggataaagtagggactagggctaagaagctcgataccaatggagacacggcgtttttgcccaccagaaagctctgaaatcttcttgtttgcaaattccgtcagccctaaatcatccataatccctgcaatgcgatgctttttagtcagcttaccacttcctttcagatgatggtccgcataaaaatcaaaggtctcagataccttgaggtactcacgaagaagattttgttggggcacataggaccaagagcgtgaacccgcagtcacaggtttgccattttctaaaatacgaaattgttggcaggttggtttaagctggccaaggagaatctcagttaaagttgttttccctgaaccagaggcacctaagataccgacaacttggccagtctccatagtaacatccaaatctgtaaagagctggttatcatttcccttatatttgaaacagatatgttcaaatgttaattgattggtttccattaatatctcctaagacataagtaacatcaaagccacaattagaatggctccgataataagaacgatgacattgacattgaaaaagagaatcaagcttagtagaatcacaaaggcgaaggccgcaaagaggtaatttttaagagatgactctttagtctgagtcaccgcaacaggttcaaaagggatttcctttttacctgttacattgctagtatcagtggtcgtctccttttcagcttccaatgcctttctctgagcctgtctgagttttcggtcgtattgtaacttctcatggtctgagaaaaagattgagcgaatcgtgtagagctcactacgcaaacgctctccctctttatccaaggtaccatttgtccagagctcctccagctcctcacgtaaaaaggaaagtgccacgaaacaatcttgagccgacatctctggagagatacggttactgacctctcttaaataagatacttcctgtcctgtctctgtatcaattgctttgtagtagtctatcatgagatgaatttagcaaaaatagcttgaagttctgacaagtcttccttaaccacttcttgggtttggttgacttgtgcgttgactgaaaagcgtgccacaacagtattgcttcgaggatcagacactgttacggtaacaatttgttctgaatcgaaggcataggtgacttgtgccaaaagctcgcctttctgacgaggttgtggcacttgtccttccacttgtcccaaaatcttcacagcaaatggattttcataatttccttctgtgatacgaagcttgaacttactctgtccatccacgaccgcaaagagatccttggtcactgccaaaggcaagaccgagttacgtggaaccacgacactattatagtagtcacccacaaagctgtagttcttgtttggatttttcttgaagagcagacctattccctgagaggtcacatccttgacaactactctgtctgtctcagttgtcttaccatcctggtgctcagagaagctaacctcgttattgacgataaggtcggccaaaatagatgccccctgtgccacgatagtgtctggattaaggtcaaacttaggttccaaaccactcatcaaacgaatcatttgacgaatcattggcatacgtgttgacccacccacaagaagaatatggtcgatttcttcccatttcaagccagatgcttgaagggtagactgtaccttgatttcagtatctttgaggaggtccaaggtaatttcattgaaaattgcttgagtaatcaagacaccgtaaccttgaccattgatataatgctcatagagagcttggtcattcacagatagactagtcttaatctgctcagccttatattgaagttgaattttttccttctcggaaaggttagtcatattgaccccttgtttttccaactcctgcatgatgtagcccacaagacgcttatcaaagtcaatcccaccaaggcgtgaattcccgtcagtcgctaaaatatcataggcatgatcagccacgcgcatgatggtaacatcaaaagttcctccaccaaggtcaaagaccaagacattcccttgagcacttttagtgtgggcataggcaatggccgcagctgtaggctcattgataatacgcaaaacgttaaatcctgcgatacgaccagcattcttcgttgccgcacgttgatctgacgtaaagtaggcaggcacggtgatgacagcatccttgataccgtctgcttgtcccatctcctgaccaacgacataggcgcgtttacggaattcgttcaaaaccaaggccgaaagaataatagaattgacacgtgtgtggtctggtgtatcactagcaatcggacgcccgatgtcacgtttgaagtcaaatttaaagttttctgtacttccgatttctgtcccacgctcgatggcttctttaccaaaagatacatggttttggccactaatatttgagaagtaaaccgctgaacgtaagacctgatcgtcattcgtccccatcggaataatctctggcacatcttcacgaacaacagccataacggaattcgttgttcctaaatcaataccaatcgctttttttctcataacaatttcccttctagcctcattcctcattttgagttttcttgactatagctccaagcaggtatccgcttagattgtctccattcatcgctgtcacataaaactccaaaagagtaaagttattccagtctagtttttttcactatactatattatcacaaataaagagactataaaataggaaaaaagggagtaggaccgaacaactttttaaaaattgttccttgtctcactcccttgagtgtcaatcaatctgatagactggataaacttagaaatacaggagtattatccacttaaagtgccatgctttatagcaactaaaatactcctactttctaaaaaaagctgagaatctcatctcagctttctttgttatagtcaaagtgaatgacttgctccgttgcatctacataggcgtggactccgaagggaacaatggctcttggtgtggcatggccaacattcagattatagacaattgggatattgctatcaatgatgtccattaaagcctccttatagtcgtcatagaaggtttcatccataggtttcccaaccaagagtccactgatgacctcaaatatcctagtttcttttaaagtttgcaacatttttttgaaatcatcaggttcaggcttttcttcacttgtttctagcaatagaatctttccttcccagtcggataagtcagggaaaagtttgtatttttggcagaggtctgtgctatctgcgtgtagagagttgtcaaaaatatcatagagagactcaagacaaccaccgaggatttctccctcaaaccgagcattgcctcgtaacaagtcaaaacctgtatttgcatggctgacacgaggtgttcccaaagctttgggactaaaatcagtccgttcctcataccaaacgttactagggcgaatttctgagatttttccggtcttaatcaattctttaaagtagtgaaggctatatggcaacatttctttgtctaactcacaaatgtctgctagaaatgattggccataaaaagtcttgatacctagtttatgtaacatgaggtggttcatggttgtatccgagaaaccgagaaaaatctttggtttgataaccttttgtagttggtcattttcaaagaggtagggtagcaagcgataggtatcgtctccaccgatagcacatagaatcatgtcgatgctatcatcagaaaatgcctgaatcaaatcctctgcacgagcttcagggtgttctttgataaaatctaagccttttagcgaatgaggtaaaaagataggattgagtccgaggcccttgagacgttgaatacccaagtccacttcgtgcttgacaaagtcttcaccgataatcccactagataaacttataataccaatagtagaaaccatgtcttgtccctcctgaaaaaagattgagcctatcttatcacaggagatgagataaaacaataggtattatattaatcagaagttccctccactaacttaatcaatcgcattctcaccaacataaataatttctaaattacccaaggaaacatcacctttgatgtagaagtccttgctggtcaagttactaggattttcctcatgctgtacagctgaaagagagttatccacattcacatgcacccgccaatcactgggcacatagaggctaagacttccaagagaaacgtccacatcaaactgagcagatggcccctcaatacggcaattatcaaaataaacggaagcctgtcctaaactaacatccgcactcccatgcgtaaattgctggtcattgagatatttggtcactgctgaaaaagtgacatcaatatcatttccaccattattagcgtccgaaccagtagaacccaatccaaaacgattctttgttttactagaaggattgaagagaatgttcaagccaataaccgcaagaatagaagaaaaaataacaaccgaattagatactggaagaaaatggaactgtccattgagtgaaaatagagccacaatgccataggcgaaaccaagaccaaaatgtcgcttcaaaagactagagagggacaaaattgccagtaagaccacccaggccaacatccaaatactaatttcccattttataaaatagtcttgtacaattaccaaagctgccaaaaggatcaagaggatcccaattaatttctttctcattatcttacctcatttcgtttagtcgttcttttaaaacttgatagtagcgtcttgatacatggacctgcttgtgggtctgatagaaattcaccgtgctggttcctgaaaaagacttctccaaagaataaatctgcttagcattaacaatcgtcgatttggaaattcgacaaaaggtaatcggaagcaactcttctaattcgtagagcttttgcttcacctcataggcctcatccttggtatgtccaaaaatcttttccccgtctgtttcaaaaaagagaatatttgccaaatccagaaaatattcgcttcgatccttgtaaaaggctaaaggaactaacttttgccttagaatagactcttggagctgggccaattcctgtgttaaccgaggagctcgaatcaagatttcagtctcatccatggatgggtccaattcgattctaactttcataatactcctttcctgtccttttgatgcttccattataacaactgctttacacaaaacaaggccttttaggtaagtggcacggtttagcccctaagaggtaaaaacagacaaacaaaagaacctggcaattgccaagttcttcattttttagtctggaggactaacctactatttgtaatccgttcaatgctaactaactgagcaagcaactgttatttcacagtattttcacgactcacattttgtgattcgccagccttgccgttgatacgatagttactgtagtcagaactgctactgctagaatcgctatcatcgtccccaacgtattccacattacaagaccaagagattttatctttgatatctcctgatgacttgaatttcgaatcataaccataatagaaatcataaacggctgtgaaggtcaccttgaaggtcttctcaccagtctgaacgacttctgtgacgtcaacgtctgagaaagtaatactatcagcggcacggtttttagcacctatagtatttttgtcaatgtcagccgttacatccttgtacatggtatcatcagtaccattaaggaaaatgtcggatacaccatctggtgtcgtgttgtgattagaagcgtagctaccaaatttaccgtaggcagcggtcaagagatggtcggccgtatcacgatcaagaacaccatcagcatctagagtaaccgtttgaccttcagagattttcttaatagacagtgtctctgtcttgatagagctaccatcttcgaaattcttcttaacataaacggctgatgatccagctactgctaccttgttaacatctagtttccctgagttaagggttccaatcttggtaccaccaacgtagaggtctccatccttaagattagacttaacagtaaagctaagatactctacagaaagattgacttctgttttagaggtcacattttcctcagatgagacagtgatatcttgatcattgaccttaccagaagccacaaaattgtaagttcctggatagagatggttcaatttagccgtgtagttattgccatctgtagtcgcataagaaaccccgttaatagtcacattcaaatcagctgtattaacggttaaatcaaccgttccaggatctaccacgactctccacttaggaaaaataaggaactgacgcccaaccttttgcatacgttcgccagacaggagttggctctttctataggcttgtgtacttttagtgtctgtgtacttgacttcggatgttttaatttcctttttagtatcagaccatacttggtattccaagctatctttaaagctcttcttagctgctgcttcataacgctctgctacttgaccacgtgagtagtagtaagaaccaaagccgtaaccagcaagtgccaagactgctgcaacaacaccagcaataatcaggattttcttccctttagccatggcaggcttggctggtttcgcagccttaccatctgagataaactgatggatggttgacacatcataacctgaagacttaccaagtaggaattcctcaggaagaggttgacgtccaacataggttttaaaagccttcatccagatggcttgtgcttctttagaagcagcctctgaattttcttcagcttgaccttgatctgcttgagatactggtgaaagctcctcagtttctataggagtcgtttcctcttcgtcaccaagcggtacatcttcaaacacttcctcggcaacgtcatactcatcaacttcttctgttagttcagaaggagtggcttcttggtccaagcccattgccgcaatgcctttaatagcctttaagtcaaagtctgctttctggccttcttcaatctccaaagcatggggcggacgaccaactgccttttcaaataaatcaatccacttttcttttgttgccataaagactcctataaacttgctttttcaaaaatcgtcagaggtttacttagaatagaagacctactgtaaatgatgacatgatagcaaatacgattgcaaacaagattgacaaaatcacaccattcaaaagtgctgccaaaatcatttgatagaatttatcagccttccacgctgttgttacaggaacaattgtaaagaggttagcaagtgcaaataagaagtaaacaacatagaacaagaatcctgggaaggcaacaagtccaatagctcccaacaagattgttacgagcaagattggcaaggccaatgatgtcaagcggccaaaacggtcaaagctattcaagaaagtagtctcaggatcacggaagatggccttacgtgttacaaatcctgccaagataaaggcaaagataaagaggaaggcagctaggatacttgcaaagaaagctccaaaaccaatgctagatgtatgacttgaaaatgaagatgagtaactatctgttccgtaagaaccaaacatactagacaatgcgtttgttgttgatacaactgggctaacaaatttacgtgccacagcgctcaagattgcaaagaaggcaagtccagtcaagagtgacaagaagatgtagttaagccaaccattgtgcttaccataatctgtcatatcagctggacgactccatgcattaagcaaccatgtccaatagtttttgaaagttgtcgcaaatgctgatggttgtgcagggacaactacagcttgaccattgataaattgaacgttttgacctggttgaagaggttgaccgttagcaaaagctgcttgttgaccagcttgagcattcgcaaaaccagcttgtggttgcgctgcttgatttggcactccttgtactggagcagtttgagcgcctgcaaaggttggttgaggttgtgctgcctgagcatttgtaaaaggagcttgcgcttgtgcgtcttgtgcactcgcaaaagtcggctgtggttgcgcttcttgggcaccagcgaaagttggctgtggttgcgcctcttgggctggtgtttcttgaacattagcgaaagctggttgaactggtgcttcttgtactggagcagtttctactgctggggcgtcatcttggaactcaccagctgcaagtgctgctgcaatttcttcttcagtcgctgaacgaccattgatggcttcaaaaaagtctaaccaatctgctttagtcataataatctccttaaaaatacatagaatgtctttattttatcacaaataaagacattaataaatgtcatttttattagaaaaaggcttggagcaaactgtccaaacctttatatcttcttacttatttctttgtagagatttttgaatctgacgatccagctctcgtttaatgtgtggttctggtgcaaatcgcgcttcccaatcacttggtttaagaattttgtgagtcacaggatcaaagtgagcctttccatctgggaaaattttccccatattagcctcatgaaccgtatcaaagaaaggcttaggatccacccccataaggacaaatgaaccataggtcaagtaaagcaagtcagtcaaagcatccacctgaccaaccatcgttgactctgagtgctctttagaactaactttgagggccgccttatcaagagcagcatgcaaatccagaacagcctgaccaaagacacgcttgtccccacctgatgaagcataaagaaattcgacgatttcttccaacttgaagtccgcacggtgactagcttcctcaataccgtaaacacgaggcatgtcgttagttgagccatccatcaaatggtggaaatccttaaccttgttgaagttgtcatcatcactggtaaatgaattttctgtctcaaaatgaatcaaaccgtagtgtgacaaggctttggcaatcccattctggttattagtatcagtgacatgggtagcctggtctttcagctcgtcttcaccattacccatggcaacaccaatgccgacgccagacagcatttctaggtcattttccgaatccccaaaggccataacctcactgagttcgaaaccaaaaacctcacctagatgagcgataccttttaacttagattggtccgctgaaataatatcggctgaataaggacttgaacgggtaatcttcacatgaggaaacttttcttcaatatcttgtgtttcccccaccgtcgctaccataaccacctgataaataggctcacgcatgatagtcttaagagtctcaatactttgtggcttgaaacgacgaatcaaagacttgaaactacgttccaccatcttagcccaggacttagggacaatacggctgacgatttgtccaaacttactcgttcccatactaataatattggaaccaacaagacctgtgctagtccctagagaaatctctctacggtgcttggtggcatagcgaatcaagttgtagactgttgatttagggagctgattttgatacaggaccttgtcatgagtcaaaatatattgaccattataagtgactgcaaaatccagacccagattgtccatgaaaggctgaacaaatcctggaccacgacctgttgccaaaccaaccaagataccatcttccttcatttgactgatagcttttttggttgaacttgacacacgttttcggtcatttagaaaagtcccatcaatatcaaaaaagactgctttaatggccacagagctcccctccttctaacatattatgctaaaataaattataacatataatataatggtgagtaatataaatgacaaaaaaaatcctagtccttcacactggaggaacaatttccatgtcagcggataatgatggcaaggtcagtcaaaacgctgataatcccatgaaccatgtggggcttgatttagacaatttagaactaaccgttctcgattttcttaatatccctagcccacatatcacaccctaccacatgctggatatttacaaaaaaatcaaggaaacagctgggcaatatgatggtgtggtcatcacccacggaacagatactctggaagagacagcctacttcctagacaccatggccgtccctgagattccaatcgtcctaactggtgccatgcgttcgtcgaacgaactaggaagcgacggagtctataactatctctcagccctacgtgttgctagcgacgacaaggccgctgacaaaggaatcctggtcgttatgaatgatgaaatccatgcagccaagtatgtgactaagacccataccacaaacgtggcaaccttccacacaccaacccacggtccactaggaatcatcatgaagcatgacatcctctggttcaaaactgcagagcctcgggttcgttttgacttggaacaaatcacaggaacagtaccaatcatcaaggcctatgctgggatgggtatcggagatggaatcatcagtctcctagaccctgaaaagattgatggcgtggttatcgaggcactaggtgctggaaacctcccaccattggctgcaagagaaatcacaaatcttatggaaaaaggagtccctgttgtgctcgtttcccgctgcttcaacggtatcgccgaacctgtctacgcctatgaaggcgggggagtcaaactccaagaagctggcgttatgtttgttaaagaactcaacgcaccaaaggctcgcctcaaactcctcatcgcactcagtgcgggactcaaagaccaagaattgaaagactatatcgagggataagacatgaaacttagtattgaagcaaccgataaattggaaaataaagatttccactatgagctgacagtctcaaaaacacatatcgccatggtctgtggcaccgtgctagtcagtctagccctggtcgcatggttgaagaaaaaataaaaagcttgaagcatgatcactagagaagtgactactgcttcaggcttttaattttcttcatctgatctatattcaagaatatctcctggttggcaatctaactccttacaaatagcatccagagtcgtaaaacggattgccttggccttgccggtctttagaaccgagagattggctggggtaataccaatacgttctgccaactcacccgagcgcatcttcttcttggcaagttcaacgtccaaattgacaataatcatatgcccctcctaaatcgtgtactcattttcctcagcaatggcattagccttagtcaaaatcatagcaacagcatagaggacaaagctaactagcaaataactgatgttaaagaaactataactatggctgcctgttccaaatgtaaagataccattattgataaaagccccaagaactagcaaatgcgctgaccaacgaaccaacttagcatttttagcaatgaaaatatcagaacgataaagattaatcaaaaaggcacgtagacacaacaagaatcctatgttgactaccatacgaaggaaatcaatggttgctgcaaaaagcgtcagactagtgctactacttttcacggtaacccccgaaccaagaagcatacgcaaaccttgttgtaagagtccttcatgacccgtcaggataaaggcatcattaagaatggtaataacaagacttaaaaagcccgcaaaaaggaggacattaacaaacaggagaatactacgtagacgtttctgttcttgcgtttcctgacgatttttagcacttttggctgatctccaaccataataactagagccagccaaggctaggatgattaaaaaataaaataagatagttgtcatgtgttacctcgattgtaaattcatttgatttctttgagcatagactagaaaaagccaaggtgcctctaggagcccttgacctcatacaaatcattagctaactattaacagtatcaattatatcgaatatcaatataaaatactagtttataggtaagattttactacttttcaaataagattccttcaattatttgacagctgtttgtcccttacgaagacagacagcatcacaagctagagagaccaagaggagccagactgatgtgctgaagtccactacaaggtgattagtcgttcccaactgtaagaagatattcaaggctgatggcacaaaggttagaagagcagcctttttcaagaagagagaaaaatcttctgtccaaaatgccttccaagtaaagtctttaaactctttacgaaggagacaaatcaaggcaagatagaaggcaaattgtaactctgatacaagccagtaaccccatccagaaaggtaatgaacctcagcacctggaaaaagattagtcacatccacaaaaggaaggataagtaaagcaagcattgcaagaccgtagattgccataagaagaataagaactgcgttgatgattgatttaagtgttttcatgataagtatttcctttattaaatagtttttagtatataatttctctttttcgcgaataagattatctttatcgaaaacttattatcgtttatcgataattatatattacactctttatttctccttgtcaacacattttatcgtttttcgatattttttatctaaatttcaaaaaaaccagtcaagaaaatctcaactggttagcttacttatgttaatcgcctagactggtcatgcttccgtctagactttttatgagtttaagaagagggattctacgttatgaaaaaaaggaaaaagggattttggaaaatgagggatgaaagttgtagaatatgggtaaatttagcctcttcctagcatcaatattagttttgataaaccttaaagtcttgaggattcttctggaaatttcggttgtaggttactttaatttttactgtcattgttttgtcctccttcgtaggaatggtttggctaagccaaaacgttttattatcaaaacctatctcgttttgatggttttattataggtgtcctaacttaaagaaagcttgtaataagcttgaaggagacttaaaactctcagtgagtttactgagagtttttctgtctaaagcatagataaaataattcccaagaccagagccacccaaacggcatagcgaattgtcgcatgatagcggtaactttcaataaccttgggtagctttgtaaagagataggcaatgtaggcaactatggaaagaaaataccctttaaaattccaggacgagcttaagatactaaaatcttcgaataggggcacaagcatcagtacagccgtaagcatacaccagaccggtaaaagcgtcctttccttttgatgctgtatatggataatcagctgagctataaaacccgcgacgtacataatcagtaataccgaacaaactagagagataagaagtgaataaagatatagggtatgaaagtccgtctttccttctatcagctttgccaattcggtaataaaccaaatcaagatgaaggcgaaaaaataaaacaggagacctaacatcataagaaataagggatgcaagatagcaaaaaaatcgatttttaaccgtttctttttcatggctttcctcctcaatcaaactcgccttggcttctcaaatgagctccaagcacctgccaatcagcattctcacgccagttagggtcagatacaatttggctggccacgcgccttgcttcttctaaaatattatagtcttccacaatatcagccacttgaaattcaggaattcctgactgacgtgttccaaagatttctcctgaaccacgcatttttaggtcctcttctgctagaacaaaaccatccgtagtctcacacatggcctgcatgcgtttttttccagtatcatttttaggattggccaccaagacacagtaggactgcttatggccacgacctacacgtcctcgaagttggtgaagctggctaagtccaaagcggtcggcatccataatgatcatgactgtagcatttggcacgttaacccctacttcgataactgtggttgatactaaaatctgagactttctttccttgaagtcctgcataatttggtctttttcatcatttttcatgcgaccgtgcatcagagccactgtagctaaatccccaaaaaaatctgtgagttcctgatgaagggccaccgcatttttcaaatcgagagcctcggactcttcaatcaaaggtgagataaaatagacctgagcatctttttccaactcacccttgatccaagtcagtacggtatctagttgctcatgtttaacccaacgggtaataatgggcttacgcccagccggcatctggtcaatgattgacacatccatctctccaaaggcagtaatcgccaaggtcctagggataggtgtcgctgtcatcatgaggacatcaggattatcacctttctcacggaaaatacgacgttgattaaccccaaaacggtgttgctcatcagtaattactaggccaagcctgtgataagtcacagcatcctgaatcagtgagtgagtccccacgatcatctgagcctccccagattcgattttggaaagagctacttttttgtccgctgccttcatcccagaagttaggagcactacctctagctcaggaaaaagcccctgcaaactctgataatgctgctctgctaagatttccgtcggtaccatgagagcagactgcaatcttgccgtataggccccatacatagccaggctagcgataactgttttccctgagcccacatctccttgcaaaagacggttcatatgagctccagatttcatatcagctaggatttccgataaactgcgctgttgggcttctgtcaaggggaatggtaattctgcaattttggctttgattttggcctcatcgtaagcaattgctataccattggtttcggacttattctcagccttcagcacctgtaagttcatctggaaataaaagagctcctcaaacttggtcctacgtagagcctgcttatattcagccaaatctttcggaaaatgcatggcacgcacagcctcttggcgtcccataagacgatacttgtccataagcacctgtgggagactctcctccaataaattcaaggccccactatcaaaagctgcctttattgcctttatcagctgggcctgactaacgccttgggccacatggtaaactggctgcatatcgtcctcaacttgagccaacactttcataccagtcactgcagacttcttctggtcccatttgccaaaaatagccacttctgcccccatctcaatcttgtccacaagataaggctggttgaagaaactaatggcaatcactgcttctccttgcttgattttaaaactcagacgattacgtttaaagccataatattgcacattggcaggtgtcaccaccgttcccgtaataacagccttttcgccatccatcagttcaaagatagacttactcttaaaatcttcatatcggaaaggaaaataaagcaagaggtccccaaccgtgtgcaaatctaatttggtaaatttttcagcggacttaggaccaaaacctttcaaatccgcaattggtgaatctagtcgaatcatatcctctatcatttctatcgtgttcttctcctcgtgaaagaggaagccttatcagctattataacacatgaaaatggtcttcactaaaatcaaaaaatccagtatcaaactggatttctctttttatttatattaatcatagctacgaggtacacgatcactaagcaaacaaagaacttcgtagttgatagtaccacgtttttcagccacctctgtcgcagtgatgcttgctcctccattttcacccataagagtaacaggagttcctaggggataaaccttaggaaggcgaacagtgatttggtccatagacacacgcccaacaataggacaaagctgtccatccacaataacgtggaaaccttgtaaatctctggtccaaccatccgcatagccaatcggaatggttccaataacctcatcagctgtcgtcgtataggttgcaccataacccacatcttgacctgctggcaaggtcttaacatgaacaagtgctgtctccaaacttaaagcaggacgaatgttatatggaaggtctaaaacactgccactaggattgagaccatagatgacgacacccagacgtaccgcattaaagactgtttctgcatgccagatgcttgtcgcagagttgctagcgtgtaccaagcgaggacggtccaccaagttattaaccaaatccgtgaagaaggccaattgacgcttgaatttactatcatctgcctcatcagccgttgcaaaatgagtaaaaataccttcgacattcgcaccaagtgatttcagaccagcaatcaagctatccgcatccccttggctacgcaccccaatacgacccatacctgaatcaaccttaatatgacaggttaaaccagtcaaatcaagcccttgattcttagtcatttccaaccactctagcgaagctaccgtcagcgtgatgttttcttgaatagccaaaggaacctcgtctggcaagactactcctaaaataagtatcggttgttctaagccagcttgacgaagttcaagcgcctcgtctaggttggaaacacaaaaaccatccacctgcttagatacatgcttggccacttcgacagcgccatgaccataagcattggccttaacaactgcaaaagtctgcacctgtttagggatgtgactaaccacttgttcaatattttctgaaattgctgatagatcaacctttgccaaggttggtcgatgtaaacttgaaatcataagctatcctcttccaacatctatctcttagtttttttctaaaatgacacttgcctgaacaaaatcaccgctatgggaaatcgagataaaaaccttgccttcaaaaggtgattgggtcaccactggagctcccttgtcattggtcaatatttcaatatccttaaagccaactgctccaataccagtaccccaagcctttgaaaatgcttccttaccggcccagcgccctgctaaataagacatctgacgattaccagaaagggattcaaaacgctcccactcttttggtgtcaataccttttttgcaaagcgtggattacggtcataagccttttttacagctgaaatttcctgcaagtctataccatgtccaaaaatcataattgttacgacagtcgattgtggatttcacgaataaggctatctgtcttatcccaaccaagacatggatctgtaattgatttaccataaacttcaggtgtgtcttgacgaccatcctcaaggtaagactcaatcataaagccacgcacggtgtccgcgatacgctcatcccactcacggttaagaaggacttcacgcacaatacgaacttgctccatgaagtttttacctgagttgtcatggttagtatcaacaaggataaatggattttccagattaagtgcactatacttgtccaaagccttaaccaagtcctcgtaatggtagttaacaatgttctgtccattttcattgttggcaccacgcaagatagcgtgagcgagtgggttaccatctgttttaacttcagcgccattgtaaaggaaatgctgttggttctgcgcagcatagataccattaaacatgacattcaaatttcctgacgttgggttcttcaaaccaattggcacatcaatacctgaagctacaaagcggtgctcttggtcctcaaccgaacgtgctccaacagcatggtagctaagcaggtcatcaaagaaggaaagatttgacggataaagcatctcatcagcgattgggaggcctgtttcagtaataatacgtgactgaaggtggcgaaccgccttaactccagcaagaaggtctacatcaccctctgcatctggttggtggataagccccttataaccatctccattagtacgtggtttagctgtataaacacgcataacaataaagattttatctttcacttctttctgaagtttggccaaacggtgagcatagtcaagaacagcttcttcattatcagacgaacatggaccaataaccaagagaatacgtttgtcctcacccttgataatttttgccaaagcctcatcattagcctgtttagttactagagcatctcccgtaagagcatgcaatttccttacttccgctacatcaatcagcggactattttgatgaattcccatctatttccctctctttgtgaaaagagagcgaaccgcttggtcatccaaacggttcactccccatatatggtttctgttaccttattattttgacaaagtatcgtggatttcacgaatcaattcttctgtcttatcccaaccaagacatgggtcagtgattgatttaccatagacatctggcgcatcttggcggccatcttcaaggtaagattcaatcatgaaaccacgtgcaactttgttgattttttcattccagtcacggttaatcaaggtttgacgaacgatacggatttgttccaagtaacgtttacctgagttatcatggtttgtatcaataacgatgaatggattttcaaggcccatttgttcatagtgttcgattgtttcaagaacatcatcatagtagaagttaggcacgtttttaccatattcattcgttgaaccacgaagaataacgtgtgccaatgggttacctgaagtttcaacttcttcaccgttaaagaggaagttttgtttgttttgtgcagcgtagataccattaaacataacgttaagattccctgatgttgggttcttcataccagttggaacatcaatacctgatgcaacaaaacggtgttgttggtcttctacagaacgtgcaccgatggcaatatatgacacaaggtcatctaccaaaggaaggttttctgggtaaagcatttcatcagcagttgtgataccagtttcagtgataacacggtagtgaagattacgaacagccttgataccattgattaggtttggtttaccttcagcatcaggttggtggacaagtcctttataaccatcaccatttgtacgaggtttagctgtataaacacgcataaccataaagactttatctttaacttcttcttgaagtttagccagacggtgagcataatcaagaactgcatcctcattgtcagatgaacatggaccaataaccaaaagcgtacggtcatcttcacccttgatgattgcttcaagctctttatcacgagcttgtttcttggcaagggcttcacctgtcaatgtagttgattctttaactgcatcaaaatcaattttttcacttactgctttaaaaaccataataattacctatttcttttttcctaaaattgtttacgaccgtgacaatttttaaatttcttaccagagccacatggacagaagtcattacgaccaaccttactaaagtcaatttcttgaccattagcatctgcttggtgagcctggatattgcctgttgctgttgttgaaacacgttcattcacattttcacgagattgttcatgaatttgtgctttcatcattgtacgtgtcacatcatattcaattgccccaatcatatcttggaacatcttgaacccttcagattgatactcaacaattggattgttttgggcataaccacgcaaaccaacggcattacgtaattgatcaagggcatcgatatggtccgtccacttgttatcaacaaccatcaaaatcaagactttttggaattcacggatagcttcctctgaacgcaatttcttgatttgacgatcataaacatcatctgctaactcattcaagtaaactttaatagcgtcataattaacactacgtttcgttacctctcccacttctcgtaaatcttcaagtgagatggcattctcaggaaccaaggcctgacgagcaaagttcaagatacctttaagagcttcctcttgatcattgcggctgtgaccatctaccgtacggttaatcgtacgcttaatcatggccttaatctcaggttcaaggtcacgttccgctgtgataacatcataacgctcagcgtagatgatttcacgttgttcacgcataacgtcatcgtactgaagaacttgtttacgagtatcgtagttatttccttcgacacgtttttgagccgcttccacttggcgtgtcaacatacgtgatttgataacaatatcttcatcatcagcattcaaacgttccaagacttgtttgatacgatcagaaccgaaacgacgcatcaattcgtcttcaagtgaaaggtagaattgagattcccctgggtccccttgacgtcccgcacgaccacgcaactggttatcgatacgacggctttcgtgacgctctgtaccaatgacacagagtccaccaaggtcaagaacaccttcaccaagtttgatgtcggtaccacgaccggccatgttggtcgcaatcgtaacggcaccacgttgacccgcattcatgataatatgcgcttctttttcgtggttcttggcattaagcacttcatgaggaatacctgcttcaaccaacatcttagaaatcaagtcagatgtttcaacggcaaccgtaccaacaaggactggctgtcccttttcataacgacgtttaacatcttgtaccacagcgcggaatttagcatccaaggtagggtaaagaaggtcatcgtggtcaatacgttgaattggacggttagttggaatcggaatgattcgcatgttgtaaatttcacggaattcatcttcctcagttttaccagtaccagtcatccctgacaatttcttgtacatacggaacatattttggtaagtgattgaggcagatgtcttcgtttcttcttgaactggcacaccttcttttgcctcaatggcttggtggagcccatctgagaaacgacgtccttccatggtacgacctgtaaattggtcaacgataagaatttcttgctcaggactgaccacatagtcaatatcatgcaacatgatgtagttggcacgaagggcgttgtcaatatagtgagtcaaggcaacattatcaatatcgtacaagttgtccaagttgaagaattcttcagccttgtcaatacctgagtcattcaaaccaatcgttttcgttggaatatcaatggcataatcatcttctgttaaggtcttaacaaaggcatccgcacggtgatataactgattagtttctgaacttacaggtcctgatacgatcaatggtgtacgggcttcatcaataagaaccgagtctacctcatcgaccaaggcatagttcaatggacgttgtaccatgttttccttacgaacaaccatgttatcacgaagatagtcgaaacctacctctgagttggttgagtaagtgatgtcacagttataagcttcacgtttttcagctggtgatttggctgaaaggttaatccctactgacaaaccaagccaactataaagctcacccatttcagttgcatcacgctctgaaaggtattcgttaacggtgataacgtgcacaccttcacctgaaatagcatttaggtaaacaggcattgtcgcagtcagggttttcccttcccctgtacgcatctctggtacgtcaccatggtgaagaacgataccacccatgatttgcacacgatatgggaaaagtccaaggacacgttttgccccttcacgaacaactgcaaatgcctctggcaagagttggtctaggctttctccgttttgatatcgttttttaaattcttctgtttttgcctgaagttcttcatctgaaagagctgccattgcatcagcatagctctcgactttcttggcagttttttctagtttcttaatttcgcctttatcattttcaatgattttgcgtaatatatttgccatcttttttcctttcgacagtctttatctccatattttaccacaaaagccccctttaaacaagaaatcactcaaggattgacaaagaaaaaagccctagtttaagggctttcacaatggatttgcaaataaacgaaaacttttttattagattcactgaaaatatcgacaataatgctttaaaactacttcttagagttctcttggctctctaggatatcctcaaaatcatgcaagagattttcaaaagcctgttcaaagaaggcatggtcggtgccgctataggccttcattatcatagggctagcttcaaaatcaacgtagaattgatagtccaagacaccatttttccagtaaaatttgatgctaggggaggccgttttttcaccgcacatcccaggaatggcccgttgtaagccataaatgtgatctccatagtcttttagacgatagtaagctccctcaaaataataggatttgccgatctcaatacgctcaaatagtgcagctaaaactttttcattactcatacttaagcctcgttagggtgactgacaatcatctccaattgtccatcaatttcccaatctgtcacatcatttggaagaatgaagtgatcacctttttttagacaataaatgcgtgaatcgatagtcatagtcccattgccagaaagtaccgaacaaagcaaataaggagctgattgtttgaagtcaaccaagccactgagtttccatttatatacggtgaagaaggagtttgatgtcaaacaagtcgactctaattgcaaggtcttaacagttgttggaacgctattttctgggtcccctagattcaagacatcaagagactgttgaatatgaagctcacgtttattgccctgatcatccttacgatcaaaatcatagacacggtaagtggtgtcgctagattgttgagtctctaagatcaggatacctggaccaatagcatgcatggtaccacttggtacaaagaaaaagtcaccttttttaacaggagttttcgacaaaagtccgtcccaatcacctgcttcaattaaggacgctaattcttcctttgtcttagccttgtgaccataaataatctctgcaccctcttcagcatcaataatataccaacattctgtctttcctagctcaccttcatgctctagtccataagcatcatcagggtgtacttgtactgagagccagtcattagcgtccaaaatctttgtcaacaaaggaaaaacactagtcttgggatttccaaaaagttctggtttatccttgtaaagttctgccagatgaaaaccagcatacttcccgtttttgacataggatacaccattaggatgggcagaaattgcccagtattcaccagtgtgttcactgggaatatcgtaaccaaactctgtcttaagtcgattacctccccagattttttcatgcattggcgaatctaaaaataaaggttccattacatcctcctgtatagagcaaaacgccttaagatcatgtcttaaagcgattttacatattttgcttatttgcgtgagtgtttgtcagctacatctttggcaagtgcaaagttaccaagcgtcgcagagccattacctgaaacagcaggtgtcacaatatactcagtcacgtctggcactggaaggtaaccattcaaaagagctgtgaatttttcacggacacgacgaagcatgtgttcttgtcccataacaccacccccaaagacgataacttctggacggtagagcacagttgcctggacagcagcttgagcaatgtagtaagcttgaacatcccaaacctcagaattttgctcaatcaattcgccacgaatacctgtacgggcttcaagtgatggaccagcagccaaaccttccaaacatccgcggtggaatggacaagttccgttaaattcattggaaacatcatttgggtgaagaggtacatatacgtgaccagcttcagtgtgacccataccaccaatgaactcaccattttgaatagcaccggctccaataccagttccgatagtgtagtaaacaagactcttaacacctttacgaacaagtgtctcaccataagcagatgagttaacatcagtcgtaaagtagaaaggaatattaaactctttagcaatcaaaccaagaaggtcgacatttgaccaatgtggttttggtgttgaagtcacaaaaccatatgtttcagagtttggatcaacatcaattggtccaaatgaaccaattgcaattccagccaattgatcttcataacgtttgaaaaattcaatagtacggtcaattgtttcgtaaggtgtagttgttgggaattgagttttttcaacgacttggaatttctcatcgccaacagcacaaacaaattttgtaccaccagcttccaagcttccgtaaagtttagccataggtaaagctatctccttttatgatcaataataactatttatactattataaataaaagctaggcaaaagacaatctaaatgagaccttgtttaaggaggtacagactactctgcttcatacttttctttatgagccatttaactaaaaaagccgaattgacttcgacttttctagcttattatttaactgcgatgaagtctgcaccttcagcaactgaaccagtcgctactgatgaaacatcttcgaagtctgcagtgtttgtaacgataaccatagttgtatcgtcaagacctgcttcagtgattactgagctatcgaaggtagccaagacatcaccttttttaatacgttgatttgcttgaactttagcatcaaatcctttaccgtcaagtgagacagtgtcgataccgatgtggataagcacttcagcacctttatcagatttaagaccgtaagcgtgacctgttgggaaggcgatttgcacttcaccatcaaatggtgcgactacttggtttcctgaaggtttaatagcggcacctttacccatagctcctgatgagaagactgggtcattaacattttccaaagctacaacttcacctttaagtggtgcagcgattgtttcggcttgcaatgcaactggagctgattctgcagatgcaatatcttcagcaacaacttctttttgagcttcaacttcttcctctttgtaaccgaagatccaagtaagagcaaaaccaagagcaagtgttacaagtaccatgatcacatacttaagcacttgaccgttaaggtaaagaagagtaccaggaacgattgttacaccaaatcctgtaccagcgaggttaaggattgaggccaaccaaccaccagcagcaccagcgataagacccatgataaatggtttaccgaaacgaaggttaaccccgaagatagctggttcagtgataccaagtaccgctgaaagagttgcagggaaagcaagtgctttcaatttagcatctttagttttaacacccactgcaagtgtcgcaccagcttgggcagtcatagcagctgtgatgatagcgttaagtgggtctttaccagtattagcaatgaggttagcttcaagcaagttaaagacgtggtgaacccctgtaacgacgataacttggtgaactccaccaagaacaagaccagcaagaccaaatggcaagttaagaatccattctgtagcagcaagaacatagctttcaacagtatggaagacaggaccaatgataaagagggccaaagctgacattactgcgaagacgataagtggacgcaagagaaggtcaagaacgtctggaacccatttacgaacccattgctcgaacttagcaccaagcaaacctacgaagaaggctggaagcactgagttttggtaacctactactggaataaaatcaaagaagtaaattggtttagcagcacctgatgcaacatcccaagcgttaggaagggcgttgttaaccatcatcaaaccaagaaccaaaccaagaagtggtgaaccaccaaatacgttaaaggctgaccaacaaatcaaggctgggaagaaggcgaaggctgtatctgtcaatacaactgtgtaagtatagaaatcagtagcagcaaaagcttttgatgttgtaccgaacaaaccaagaactgtatcgttattgattgctccacggatacccatgaaaagaccagtcgctacgattgctggaagcaatggaacgaaaacgtcaccgaatgaacggatagcacgttggaaccagttaccttgtttagcagcttctgctttttgttcgtctttagatgctgttggaagaccttgagcaacgacttcgtcgtaaatcttgttaacagtacctgtaccaaaaatcatttggtattgacctgagttaaagaaagcaccttgaactttttcaatgttctcagccttttctttattgattttgttttcatctttgaccatcacacgtagacgagtcgcacagtgagcaacactgttgacgttttcacgtccaccgagggcatcgatgacttcttttgcaatttgtttgttatccatttgcaaaattctccttaataaaatttggtatgaaagcgtttagcttttctttacgataactattttagcatctttctgccatatgtcaaccgtttagcatatttttttattttttgttataaatcgttgatttttataggtaaaacgtttactatattattaacaaatagattaggagattactaaatatgaatctaccaacagaagttcgttaccgtccatacgcagattggacagacgaagaaaaaacaaagattagagaaaatgtcgctaaatcaccttggcgtgcaagttaccatatcgaaccagaaacagggcttcttaatgatccaaacggtttttcttactttaatggtaagttccaacttttctaccaaagttggccatttggagctgctcatggtttgaaacaatgggtgcatactgaaactgaagatttggttcactttacagaaactggtgtcaaactcttgccagaccatgaaaatgatagccacggtgcctactcaggttctgcttatcaaatcggtgataaactctttatcttctatactgggaacgttcgtgatgaaaactgggttcgtgacccacgtcaaatcggcgcttggatggataaagacggtaaaatcgaaaaattcgacaaggttcttatcaaacaacctgctgacgctactgggcacttccgtgaccctcaaatcttcgattacaagggacaattctacgctatcgtaggtgctcaaaaccacgataaacaaggttatatcaaactttacaaggcagtagacaatgatgtcgaaaactgggttgaggttggtaatcttgactttggtggcactgggtcagagtacatgattgagtgtcctaaccttgtctttgtagatggcaaacctgttcttctttatagcccacaaggtctcgataaagctgaacttgactacggtaacatctaccctaacacttataagattttccaagatttcgacacagaaaaacctgccctcgttgatggcacaccaattatcaacttggactacggatttgaagcatatgcaactcaaggctttaatactccagatggtcgtgcccttattgtcagctggatcggtcttccagatgtggactatccaactgacaaatacgactaccaaggggctatgagcttggttaaagaattgtctattaaagatggcaaactctaccaatatccagtcgaagccattacaagcttacgtgctagccaagaagatttctctgaaaaaacggcaacaactaacacttacgagcttgaacttaactttgaagctaacactcaaacagaacttgtcctcttcgcagaccaagaaggaaatggcttgtcacttacagttgatactgaaaacggaaaagttatccttgaccgttctaaagctggtgaacaatatgcgactgactttggcacaagtcgtgaatgtactcttgatgccggtcaagctgcaacagcaaacatctttgtagacaattcaatcgttgaaattttcttcaacaaaggtgaaaaagtcttcactagccgcgtcttcccaagtgcagaacaaactggtatcaaagtgacatcagggaacgtttctggacactacttcgacttgaaatactaaggtgatttatggtcgcaaagcttactgacgttgccgaactggctggtgtgagcccaaccacagtttctcgcgtcataaacaaaaagggctacctctcacagaagaccattgacaaagttcacgctgctatgcaagaactcaactataaacctaataatttagctcgaggtcttcaaggaaagtcggccaaacttgttggcttgattttcccaaatatctccaatgtcttttatgctgagcttattgaacgtcttgaagatgaactctttaagcaaggctataaaaccatcatttgtaacagtgagcatgatcctaacaaggaaaaggactatttggagatgcttgccgccaatcaatgtgatggcatcatctcgtctagccacaatcttggcattgaggattatgagaaggttgaagctcccatcgttgccttcgaccgtaatctcgccccaaagattcctatcgtttcatctgacaactttgaaggtgggaagttagccgcaagagctctggttaaagctggttgtcaacgaattgtcatgattacaggttatgataattcagattctccaacaggactccgtcaactaggttttaattatgagttggacaaaaaaggtattatttgtcctgttccaaacgatttgtctctcatgcgacgtgaattagaaatcaaatctatcatttctcgtgaaaaggcagatggcatctttgtttcggacgatttaacagctatcttggttatgaaggtagctagacaattggaactttctatccctgatgaccttaaaatcatcggttatgacggaactgcctttatccgtcacttctacccagagctagcaaccatccaacaacctttggacgaaattgctaagctttgtgtcgaaattcttctcaagaaaattaaaggcaaaacagttaatcgtgattacgtgcttccagtaagtttgattgccggtggtagtatataaataaaagtcgcaagaaatctccgcttgcgacttttattcttgttaaatttgtaaaaaaagaagttgaaacagtgctcaacttcttttgcttatgcttcatctgtcacgaactgactaagtacaccgttaatgaacttagcagatgtttcatcagaatattttttagcgatttcaatgatttcgttgatagccacacgtcctggtgtttcttcaaatgacgtgatttcataaagtcctaaacgaaggaggatacgatctgtcacaatcaaacgtgagagactccaaccctctttcaatttttcttcaatttgactatcaagttgagccaactcttcacggacgcctgttactaggctaaggagaaaggctggtacatcaacttcagtttcttcgtcaattggcttgtcataagtgtaagcgaaatgtgcttgttccagagcttcaccaccaaattcaagggcaaaaagcgtttgaaaagcacgctcacgaaggtcacgacgtgaatctttaaagatattagtcattcaaaaaatcctcgttaaacaattcagccaagtctggtttttgtgacttttcagtaacaatagattcaacgtgaacgttgacttctgaaattgccacttctgccatatcatagacagctgctttaacagccttttgaatttcaattgaaaccgctggtacgttaaccccatactgaagtgaaacgtagatatcagcatttacagtaccatcttcttctgttcggaggtaaacaccacgtcccaagcttgttttgctgagactatccgtaacatttttattttgaagggcgtaaacaccttccactttagttgcagcgatacctgtaatcacttcgagcacgcgaggggcaattacaatttcaccgatattttctgtagtcatcgcatgtttcctttccgttagtttggaaaataaagccttcaaaccaatggtttgaaagacttagtcgggcttaggcacgtgatacgtaagtaccttcagctgtgttgataaccaatttttgaccagcttcgataaagtctggaacgttaaccacaagaccagtttcaagtgttgcaggtttacctgaacctgtaactgttgcacccttgattgatggttgtgtttcagtaacagtcaattcaacagttgttggtacttgcacaccgataacttctgttccgtagaattggatttttacttctgagttttcaaggataaatttcaattcttcttgaacgttggctactgggatttcatattggtcatatgtttcagtgttcatgaagtatgcagtatcatccatttggtacaagtattgtgctggtactgtttcgatgattgcttgttcaaatttttcttctggacggtagctagtatcaaaagttgaacctgagcgaacatcacgcaatttcatacgcatgattgtgttacctttaccaggtttgtggtggctagcttcaagaactttgatcaatttgccatcgttagttacgaaagtcatacccgcacggagtttacttgcttcaatcattattaaatacctctttgtaaaaaattattatcagtttattctaccataaatgacagcatggctcaaatgttttatagattcaagcccaatcctcaggctttttccaaagaacaaactagtcatccattcctaagtgaacctctggaacatcatgttgcaaataagaaacacccttttgttccatcaactcaatcgcaaatgggtgcggtctataattggccttgtaagtaatctttacgataccagcttgcaagagggctttggtgcagttgatacaaggaaaatgcgtcacataaatctctgtatttttggtagaaatcccctctttggcacattggataagggcattcatctctgcgtgtaccgtacgaatacaatgaccatcttccatgtagtgacctacttcgttacagttatcagtctcagaaaccccgccgttataacctgtagcgataatacgcttgtccttgactaaaacagccccaacaaaggcacggtcacaagtagaacgcttagaaatcagctctgcattagccataaaataatcttgccaagataaacggtttggcataaagtattcctccaaatcttagagaacaatcaattccttaggcgcaagggtaatcagttcacaaccattctctgtgataataatgtcatcttcgatacgaacaccatatttatcagccaaataaacacctggttcgtctgtcaaaaccataccagcttcgatagtttcatcggaattaccaaagtaaggaatctcgtgaatatcaagaccgataccgtgtccgataccatgtgtaaagtaatcaccgtaccccgcttcgacaataacatcacgcgcaaccttatcatagtcacgacgtgtcatgccagccttagccgcgtcaatcaaggcctgattagaacgtagaacgatatcataaatttcacgctcctcatcagtagtgtcaccaatatggatagtacgagtcatatcgctaacgtagtggttgtagtaacaaccaaagtccatagtcaaggtctcaccagattgaataaccttttctgaagcaaccccgtgaggcatagctgaacggtagcctgaagcaatgatagactcaaaggaaatccctgaagctccgtactcgcgcatacggaaatctaagaagtttgctacttgtagctctgttgtttgacctggtttaatgaaatcaagcacatctgtaaaggcacggtctgagatagaacaagccttacggatagttgccaattctttttcgtccttgatcatacgcaactcttccatgaagttgctttgtggtgacaaagtgtagccttcaaaaatcgcttgaagaccttggtagtaagcaaatgacacctgattatcaaaaccgattgtttcaaggttatcagcctcgataattttaacaatatccttaagtggatccttactttcgataatatcaaagccatgcacagattgtttggcaatgagggtataacgtgaatccgttaagaagaggcgacgattcttagtaatgaagacagtcgcatttgtcccccagaaatctgttaaataatagatatttttttgtcctgtcaccaacaaggcatcaaggcctgattgggaaagtttggcatcaaatcgttcaagtctacgttgcattatgaattactcctttggtattttaggttaattataccaaattttcagactttaaaggattaaattgacattttagattgtttttttgatgtcataaagaaaaagccagatgaaactctgactttattagcattatacaaaggctcgcttttcgtagatagttggcataaaaaggagcaaaatcatagtccaaacaaacaaaacaaaggcttcgcgaagattaaagaacccttgaccactagtaaagactgctcgcataaaactaaatggcacataagtcatcagcttagtcatggtatcccctaaactagccaaatagagcgtgaagaaagtcattcctgtcactccaaaataagccgttacaaaggccgttaaggtattcttcacaaacaagacaagcaaagaggaaatcatataaataaaggctccatagagtagaaaatcaatatagatgcctctgatataatcccacaaaggaaaatctacatgttgcacagaatacttgtagaaggccaactccaaaaccaaaatagtagcagcaactatcgataacacaaggaaacttaaaagttttcgaagaataacctcgcgtccagataaggaagacacccgaatcatattaattgttcgattctgaaattctcgtccaagactagacactgctagataagcaaagacgatatccacgataaaggaataactggcaataatcgctgatggcccaaggtaatctcccttatagccatcacataagattacaattgcaccaatcaatgctaccaatccaagacaaataaaaacactccttgtcacacattcctgctttaaaaataccgttctcaatttacttttcattgaatagcacctcacttaatccttctttttcataagtaaaaggaatcccctcccgatccataacctgcttaacagctgccaaccctttgactaagatgtcatgcttttgtcgttcaaaaggtataccatttaatttgagtagggtcattaatgacttcaaacttaaatcctcagtataaatcttatatttgacattatcactgtcatctaagtaaatcagcttatgattcttcaacaaataatttttcgtacaaacctgttcaagattagacaggatatgacttgagataataaaggttagaccatggtttttagctaactttttaattaatgtgaggagactgttgattccattaggatccaaaccatttgtaggctcatcaagaaggatgagttcatctgaagcaattaaggtgataaacaaacccacacgttgcttcattcccaaagacaatttagaagccttgcgtttaagatagactgccacctccaactcgtctttataacggtcaatcaacgcgtaatctttactgtacaatttacaatagaatttaaggttagcttcaacagtcatgttaggatatagagctggagcttcaatcagggctcctacagtttttgtttttaagtcaataatatccttgggtcctgccaagatacctgagactagtttcatcagggtcgtcttccctgcaccattattaccaatcaaaccagcaatatcccccttctctaacgtgaacgagatattatccaaaacggtttgctttccaaaactataggttaagcctttcaccgctagcactgtcatgtatttacctttctttgtttaaatatatttctaatataaatctttaacatccaagtgaatagttcacttggacgatgaaaacttataactcttattctttttaactctcatgaaaataggagttatttaataacctgctatcttatttttctcagttttaaaatctcaactgcaatataacttacttgtccaactccataaccaatgtcatatgctacatttcccccgacaatttcagaaagcttatcaaaggttaaagaatcaaatctattcatcgccattgtatccatatatattccccttaacctctaaatccatctacaaatccacgaccaaaatcataaaccgtgtgagtaactactccgactccatatcctacagatgagtaaatacttccaccaactacaattgctaaatctttaatatcaattttttgaaatgtatttttcatgttctctcctattctttatttcattgacttcgactacctaccacgcttgacgaaaaccttttacaaattcgttaataacgtacttaccatatttaactgggttgaaaccaccactgatttgctctaaatcatcattggacaacaccgtaaataattgtttttcttctaacattacaaagctcctttctaaataaaattctaaggttagctctctcggcagctcttagctactaagtccaagctatgacttcattataagagcttaacgaaataaaaaatagtgacataaatgtcaccattccataagattaaagacaaaaagaaaaggctaagcaataaactcaacctaagactatagtaatcaacagagaaaatcatttctccttatccttactcgctactctaagcgcaaacaaagaaaaagctagcgaaagtgttgaccagacgagacaatggtcaataaaggcaacgccttcggtgaaacttaacgtagcatttatcatcacaataaatagccagacgatcacgataacaatgcttaaacttctaataagattattcttctgtttatccatatttctctttcccatatctggtgctcatggtaacttctaatcgccataaggaggtcttcttttcaaccaccatttgttccaacccaatcgttcaggtaaggtttgaggtttagatacaaaaccaccccctgtaacactttctaagatttcagcattgagctcttcaccatatgccttagttcgcattcttatttctcctttcttttcaaaaataaatacagcaatgaccacttggactatacaaagatttagtcgtcttggagacctagtggatttgggtataaggtcattataagttctcccttttcaaaaaaatagtgacataaatgtcactaccactgaacacaaaaagacaggcctttataagacctgttccaaaacttgtttatttctacggtgtttcagaataagataaaaaattacttcaaaaaggagaaaactaaaataaattcctaaaacataaagcaaagtttcccatttatctgttgctgattgaaaatggccatgatgatccactgtacggatgctaattaaaagacaaatatctagaaatagggctagaagaataccattaaagcctataaaaaaacgctttttaaccatagtctgactcctgtatgttttttcttaaccatagaatagcaagctcaacttaaaccagcctaaagcaaaaaaagactcagagagccctttttcctttatgtcaatttttctttcaaatattgtcctgtgtagctttttgaaacagctgctacttcctctggagtccctgtagctacgatggtacctccaccgacaccgccttcaggacccaaatcaatgatgtggtctgcggtcttgataacatctagattgtgctcaatcacgagaacagtgttgccatcatccgcaaaacgctgaagcaccttcaaaagacgagcaatgtcatccgtatggagacccgtcgtcggttcatccagaatgtagaaggacttcccagtagagcgtttgtgcaactcactagccagtttcatacgttgagcctcaccacctgataaggttgttgctggttgtcccagagtcacatacccgagccccacgtccttgattgtctgcaccttacgagcaatcttagggatagccgcaaagaagtcaactgcgtcatcaactgtcatatccagaatttcagcaatatttttccccttataacgaacttctaaggtctcagaattatagcgtgtgccatggcaaacctcacaagggacatagacgtcaggcaagaaatgcatctcaatcttgataataccatcaccagagcaggcttcacaacggccgcccttgacattgaaagagaaacgtcccttcttgtaaccgcgaatcttggcctcattggtttgggcaaacagatcacgaatatcgtcaaagacgcccgtataagtcgctggattagaacgaggtgtacgcccaattggactttggtcaatatcaatcaaacgctcgatatactcgattcctgtcactgatttgtgtttaccaggtttctcactatttcgattaagctcttgggcaatctttttcttgagaattccgttaaccaaagtcgattttcccgaaccagaaacaccagtgactgcaatcaactttccaagtggaaacttgacagatacattcttaaggttattttcactagcacctttaacctcgataaaacgaccattacctacacgacgttcctgaggaacaggaattgattttgcacctgacagatattgcccggtgattgaattcttgttcttagcaacttcctctggggttcctaaggccatgatttgaccaccaaaagcaccagcaccaggtcccacatcaataagccagtcagcctcacgcatagtatcttcatcatgctccaccacaatcagggtattgcccaagtcacgcatctttttaagacttgatatcaagcgatcattgtcacgctgatgaagcccaatagaaggctcatccaaaacatataggactccagaaaggttagagccaatctgtgtcgccaaacggatacgctgactctcacccccagaaagggttccggccatacgagagagggtcaaataattaagacctacattattaaggaaagtcaagcgatccttgatttccttaacaattggacgagcgatcactccttcattttcacctaattccaggctatcaatttcctgaagatgatctgaaatagacaaatcagagatttgaccaatatttaggccattctcaccaccaacacgaaccgagagagctgcttcattaagacgatagccatgacaagttggacatgacaactcattcatataacctcgcatgacattgcgagtgaaatcactattggtctcgtggtagcgacgattaatattagtcacaaccccttcaaaaggaatgtcaatatcacgcaccccaccaaaatcattaacataatggaagtggaattcgcggtcctcagatccatagaggatcaaatcctgttcttcttttttcagattttcaaatggtgtatccatatccacgccgaactgctccatggcctgctcaagcatagctggataatagttggatgatataggattccaaggcgccagagcaccctcacgcaaggttttactagcatcagggataaccaaatccatatcaacttccagtttattacccaaaccatcacaggtcggacaagagccaaacggtgcattgaatgaaaagagacggggctccaactctggcactgtgaagccacaaaccggacaagaataatgctctgagtaaagcaactcattatcatccatagtatccacaatcaagtaaccatctgctaaacgaagggccgcctccaccgaatcaaagagacgactacggataccctccttatttaccaagcggtctacaaccacttcgatattatgcatcttagacttggacaactctggcacttctgtgacatcgtaaatctcaccatctacacgaacacgaacataaccgtctttctgtacacgctcaaaaacagccttgtgttgccctttcctacgacgaacaattggtgccaaaatttgcatacgtgtacgctcaggaagagctagaacctcgtccacaatctgttccacagaggacgactgaatggctccatgaccattaggacaataaggaacacccacacgcgcatacaggagacgaagatagtcattagtctctgttgccgttccgaccgtcgaacgagggtttttacttgttgttttctggtcaatggagatggcaggactcaaaccatcaatcgagtccacatcaggtttctccatattccccaaaaactggcgggcataggctgagagactttccacataacgacgttgcccctctgcatagatggtatcaaaggccaaagaagacttaccagaacctgacaagcccgtcaccaccaccagtttatcacgcggaatctccacatcgatattttttaaattgtgagctcttgctccatgaatcactaacttatcttgcatatttttaagaggccctagcccaaaagctactgccgctcctttctacagacggatggaaaaaccatcccgactttctctcataattataacaaaatttcaatttatccagcccaaaaatgtttcaaatgtagtataatggtggagtgtctaaaaaaggcaaggaacatcatcccaagcctcatttgacagcactaaaaaagttaagagcagtgttaattggacttaaaagcgattgtaaaaatccttttacaatcaagatgctagcgcttacttaatgacgaaggaggggttcccattgaaacaaatgttcttatccaccggaaaagaattcaaagaaattgaaacattcgagcctggtgcttggattcatttggtgaacccttcccaagaagaagccatgaaggtcgcagaacggtttaacattgatattcaagacctccgcgcccctctggacgtggaagaaacttcacgtatcgatgtcgaagatgactacaccctgattctggtcgacgtcccaacccaagaagagcgtaataacaaaagctactacgtcactattccattgggtatcatcgttaccgatgaggtggttgttactacttgtcttgaggacattagtctcatggataacttcctcaaccaccgtgtgcgtaacttctacacctttatgaaaacccgttttgtctttcagattctctatcgcaacgctcaactttacctaaccgccctacgttctatcgaccgtcagagtgataaattggaagctcagttggaaaatgcgactaaaaacgagcacttgattgacatgatggaattggaaaaatccattgtctatctaaaagcctcacttaagatgaatgagcgaattgtcaaaaagctaacaggtaacgcctctagcttgaagaaatatatcgaggacgaggacctcttggaagatacgctggtcgaaacccaacaggccattgagatggcaggcatctatgaaaacgtcttgaatgccatggctgaaacctctgcctctatcattggcaataaccagaacactatcatgaaaacactcgctctcatgactatggctctggacatcccaaccgttatcttctccgcctacggtatgaactttaaaaacaattctatgccactaaacgatttagataacgccttttgggtcatcttcttcatggcagccttcgggtcatcctgcgttgttatctactttatcaggaaaaaatggttctaacatagagcctcttcttttccctaaactacaaaactaaaaaaataatactatttatcgaaaggtcatctcatggacatccaaaaactcaccaagaaaaaccaagaatttatccacatcgcaactaaccaactcatcaaagatggtaaatcagaccaagaaatcaaagacattcttggcaatgtcattcctgaacttatcgaaaatcagaaaaaaggaattacaggacgtggactccttggtgctccaactgtttgggctgctagtttctctcctgaaaaacaccaaaaacctgaaactggtaagcctaacaaagaagtgccagaaacagataaaacaccttggaagatgtggcttgatacctctctcttccttctagccatcgttgcaatcatgaacgcaatctttggtttctcaggtacacaaactagctacggtctcacaacccttctttcagtgtcattcattggaggccttgctatgtataccccttatcactacatctaccgtcacaataacaaaccaaaagaagaacgtccaaaatggtggttcagcatgaccgtcatcacactctcttttattgcatggtttgctctcttcagtcttacagcccttcttccaagctacctcaaccctggtctttcaccaattgtaatccttattattggcgttattgctggtgttgccaaatacttcttcaaacgtcactacaatgttcaaagtacttacgcacctgcatcttaatcaaactcaacctcaagcacccttgtgggtgcttttttacgtcagaaatcttgacacagttggctattctatactaaaatgttaaagttaatagacaaaagaaagaattccaatagatgcgtatcaaatttcctctactaatcattgcttgctgcctattacttatggcttgtggccacaagaatactcagaaaaactatcaagcttactatagttttaacaatgtgacgtcttccactcaggaaaaacaactagcaaaagccttaaaaagcaagggcatcccgacaaaagactgggacaatctagccccttatattactcgttacaatcaggaaaatacaaacctccaacctgttgtcaaaaaatggaccaaaagtaaaatcggcaaggatcaaaaccaattcgtcaccttccttaatgaaaaaactttcgaagataacaaatcacattttactgatgacttaaactgccgacgaacatcgttcctccttcttcatgatcttattacaagttcagaggacctcaccaaattggacctcccccttcaaaacgaatttatagatcttaagtcacgccacaaagagctaactgccaaggatcaagctctctatagtctcctctttggggataatatcagctatcagtctacagatgatcttcttaaatcttggaaaaaagctggactcaagttcccagaaaaggttaaactcctctctgtctttcaaaatagccctggtgatgttagcaatttccacacggctatagcttacgaaaaagacggcagtatctatgtctttgaaaaacaggaccctacacttccttacaggtggagccgcttcaataattgggcggacatcaaaacacactggttatccaaccgcttcaaggtcttcaaagacaatgttgatatccttgttaatgaccaaaaatttgatgatttcttagaaaacacactctatataccacaaaacaaccaactagctcctcaagataaatgagaagaccagttggtttttctttttccctaaagtataaaataaaactcaacacacaagcctaaaaagaaaaaagcccataaaaccaagccagaaaaaaacaccctcagtcgagggcattatttttagtcttcgtttacgtaaggcataagtgccataacgcgagcgcgtttaatcgctgttgttactttacgttggtttttagctgaagttcctgttacacgacgtggaagaattttaccacgttctgaaacgaaacggctaagaagctcagtatctttgtaatcaacatattcgattttgttagctgcgatgtaatcaacttttttacggcgtttgaatccgccacgacgttgttgagccatgtttatttctcctttatatatttaattcgttttgtccattcttagaatgggagatcgtcatctgaaatatccattggatttgaattaccaaatggactctcatcacgaccgaagtttggtgtagattgtgcaggttgtgatccaccaaatgaaccaccagttgaagctcctccaccgaatgaatttgaattatcaaatcctccagcgttgtaagaaccaccactgtgaccttcacgtgccgcacggctttccaacatttggaaattatcagcgacaacttcagttacgtaaacacgttgaccttgttgattttcatagttacgagtctgaatacgacctgtaattccaatcaatgcgcctttcttagcccagttagccaaattttcagcttgctggcgccagataacacagttaataaagtcagtttcacgttcaccattagcacccttgaagttacggttaacagcaaggctgaatgttgcaacagcaacgttacttggtgtataacgaagttccgcatcacgggtcatgcgaccaacgagtacgacattattaatcataatttaccttcttacgcgtcaagtttaacgatcatgtgacgaagaatgtcaccgttgatttttgaaagacggtcgaactcgttaagagctacatcgtcgtttgcttcaacgttaacaacgtggtaaagtccttcacggaaatcttggatttcgtatgcaagacgacgtttttcccaatcttttgattcaacaacagttgcaccgttgtcagtcaagatagaatcgaaacgtgctaccaaagcgtttttagcttcttcttcaatgtttggacgaatgatataaagaatttcgtatttagccattgatattttcctcctcttttggtctaatgactcatggtctttcgccacgagtaagtgaggtgcactcacaagatatgattttaccaaagaataggagatattgcaaggaaaaacttattaactttatcttccaaatagtaaaaagtttaaatgaccaagaaaagagctagacctcatcagttatcttttctctgactaaacttcatgctaaaataagagaatgctttatcataaaaagaaattaggggaaaaactaggacttccaacctttaaccactactacaatattcctattactaccctagaatatgattttaaaaacttaggtccaagtgatacctacattatcacttttaaacaggacaataacctctttgttgttgacataagacatcagcttggtcataccagtcattttgataccgtctccctctttgaacaagataatctcttatcaggtatcgctgctgtccctttagcctctgttcctagcatacaaatcttgtcttttccagacaagttacactctctgaaccctagtcagcgtctaaaaaatctcgtcgctctttactacaaggatgaagaaatcatgcgttacctcaagacgaataaaaatatcggtgatcaggtgacaagatatcaattagaggctgatcgactagaaagacaaggtaagagttttgacttcttcaagtacaccagtcgtggcaaagtacgagaagaagacggtctatcggaagtgtctagcaaggactacgacttcattcctgattttcatcccttcttaacctcaccaagaagccagcaggttttaagcgtcccagtaacctactgtgatgacaaaacgaaacagaccgctaaaatagacatcatggggtggtatatcaaggaccagcaacttaagattcgttggaaacccaagtacatgcgcaaacggcgatggcgctcatcacgtatctcaattgatatcgtgaccgacaactacttcttccaaggacaaatctatagagatagtagtgctcccatatttctgaacaacctaagctttgatagcaagattcctaagagcttcctgccgcatcttaaaaatcaataccaaatctttatggctctagtcgaagaacaaaaaagactggctctcctacgaaaggtccagttaaacaataaggattaagtacctttcagcaaaattcaacatatcaaaaagctcattcttacacgctagaatgagcttttaagattcttcaattgtcattagaacatccttttggaattttgtaaaaaatattttcataaggaggagtcattgtgtgtcaccatttttatacctagcaatcatagattacctccatcaacttacaaataacttttttgtattgtaaattttctattacatcggtatcactccctaagctattttatgcaataacttgaagtgtctccatttttataacgtcctaaattcatcatcatagtaatcacctctgattcatatgatttgagacctatctccccattgaccactcaatgaggtttacttgtcgccgttcttataacgacttacatcaaacatcaacataagcgtcacctcggtactttgttacaagatttaagcatttaacttttgtcgatagattactcatttggcattggtatcactccttaagctattttacgcaacagcttaagtgtctccatttttatacctactaacatttctcatgagctttacctcactttttgacgttaatcttgagtttagctttcgatttctggtggtatcactcccttgtagctattttatgcaacattattaatcgccgtttttatacctactcatatttttcatgaactcacctcgttcatcttaagaatataggatttacgtttcgtgtggcatgggtatcactccttaggctattttacgcaacaacctatgtgtctccatttttatacctactaacatttctcatgagctttacctcacttttcttaagttaacagatttgagtttggttttcgacttctggtggtatcactcccttgtagctattttatgcgactgaattaatctccgttcttgtaccgccctactgtcatgcggtcacgctcctcagagatgattggtaaagttatttgttttgcctactgttttgtttagagatcttagtctccgtttttgtaccttgaaatatttactctcaccatggctcttacctccttgatgaatccttatcttctttacacttttagtataatgtaaacgcttacttttgtcaatctttttaacagaaaaacgcataattttttgaaaaaagatttctttgctacaatagagacatgttagatttaaaagaatacggcattgtcatgtgggacgctgagaaaatcgcgtcttttcgtcgcaccctcctggactggtacgatcgagagaaacgagacctcccctggcgtaggactagaaatccatactatatctgggtcagtgaaatcatgctacaacaaacccaggttcagactgttattccctattacgagcgctttttagactggttcccaacagttaaggatttggccgaagccccagaagagaagcttctcaaagcttgggagggactaggctactattcacgtgtccgaaacatgcaaaaggctgcgcaacaaatcatggatgactttgatggtcagtttccagatacatatgaaaacattgccaaactcaagggcatcggaccctatactgctggtgctatttctagcattgcttttgggctcccagaacctgctgttgatggtaatgttatgcgggttatggctcgtctctttgaggttaactacgatatcggagacgccaaaaatcgtaagattttccaagcgattatggacattttgattgaccctgaccgtccaggtgactttaaccaggcgcttatggaccttgggactgatatcgagtcagctaaaaatccaagacccaacgaaagccctattcgctttttctgtgctgcctatctcaatggaacttatgacaaataccccatcaaattgccaaagaaaaagcctaaacctatgcaaattcaggcttttattatcagaaatgcaaagggtgaatttctgctcgaaaaaaatatcgagggacgtctgctaggtggtttctggtccttccctatcatggaaacagactttattagccaacaactcagcctttttgaaaaggatgatagtattctcgagacagtctctcaaaaagctatttttgagaaagattattccctcaaaccagagtggtctagcaataattttgcacccgtaaagcataccttcagccatcaaaaatggaccatcgaaatggtggaaggcaacgttaagaacggtaaacctacttccgataaggagctacgctgggtggctagtcaagactttgaccagttcccaatggccacaccacagaagaagatgattaaaacttatgaagacagtaaaaaaggatagcattgtgtgctaccctttttcttatacatcaagtttatcgtgcttacggcctcgcaaagcaaggtatacttttgaaagaactactcccaaaaagatataaaacaattccaaataagtcacattttttgacatcaaaaattcaatcatacccaacacaacgctccgtaacttactgctcctccagctaatcccaataaagctcctcctgggccactagtgataagacccgtgatacttgttccgagggctgccttagctgcattgttccaactacatccaccacctacaaccactgataattcctgatgtgtcaatacttgttgtgtcatttctgatgttttcaatatattttctccttattaatactaatttttctatttatggtaattgtgagttgcaaatctcttagtgtcctcactaatcactaagagatatcctaaaattaactgtctattctatctcctttcattttaaagacaactgtcgctagctctcagttatatccttaagttatgcttttattataggtaagatggccaataaaaaatagtgacataaatgtcactatggaggacaaaaaagccgaaacgtttaagtttcggcttgaaaattattaatcgactttatagaagaagtaactgtcgtcagtggttccataaattgactgaccactccagatgcggtccttacttttatctgactgatcatcagctttctcatttggtgatgatgttacagaaccggtcaaggctactcctttgggtaagaatgcaatcattccaccaccaggaccaacttcttttggcacaagtcctgctttaaaaaagccatcagcaattttaccatattcaattgctactttctcagtatcactcactaacccatttttatcaaaggtcatcgtatagcctttgccattcttccaagttccagcgatacttgaaaaatcaccattttggatagcattgatatccataccagtctctttgttggacttgctatcgctactgcttgcttctgtctcgtcactacttgagtcgtcaaagtcataccagtcttcggaagacaaatcgaaagtctgagcgttacctaggccaaccttactggcaccgtcagttgtatcagacatgctgaaatcaactgattgaagctggctaaaggcaccatctttaatttcataggtctcagctttggcctcaggtctcatacgttggaatagttggcagtaaatcgtaccatctttatagaatttcatggtgctcaagtaaccacccttggcaaaggttccagcacttttggcaaatacaggcttatcatcattatcaagataataaagggcatgaacactgtcaggagtaccaatcaaaagctcagctgagccatcaccgttgatgtctacataactatattgcacgttttctcctgctcttttagcatcaaaaatagtgctagtcgcataagcttcgtcagacgaaagatcacttggaacagctgatgtatcgccgttcagagcaatagggcgatagagatccaagactgaagcatagagctcatcgtagctcacttcctccgtttcagatgaatcaccactcacttgttcagacttagaagcgctgtcgcctgagcctgaaccacccgtatttgttgcgttacaagctgtcagcaagaacaaacttgataagagcgcaaatcctgttaatttctttttcataactatcctttcataagaaacgacctaatataaatattaaatcatttaaatctctctgacattatgttaacaattgtatggttgataagtcaagtattttttgaaaaattaatttatatttatttatcaagaacacttatataatcatagctttcactataatccaacaattccatcctcaattaaattagagttttgattaaaatgtctagatattaattagtgattcttttttcatttacaaatatctgcatcaaaaaaagccgaacctcagtcctgctttcatctgtctatttctacttggtcataaagtaggtgataatcaccaatactgctacgatagctaggacaacggccaggaatcctagcatgtaacgcaagagaaagtaggtaaatggaaaattttctttcatgttttactttgcctcataccatgtacggccgtcattctcatctgcaatgagtgggacagcgagttcgactgcagcttccatggtttctttaaccaaggctttcatcgctacaagttcatcgtttggcacctcaaggacgatttcatcgtgcacttggaggagcatcttagttttgtagccaccttctaccaaagccttgtctaagttaatcatagcaatcttgaggatatcagcggcacttccttggataggtgagttgatggctgtacgctctgcgaagttgcgaacattaaagttacgagaattgatatctggcaactcacgacggcggtggaagagagtttctacgtagcccttatccttagcttcacgaaccacattatccatataggctttgataccaggataacgctcaaagtaggtgtcgatatactccttggcctttttacggctaatgccaaggttattagaaagtccgaagtcagaaatgccataaacgataccaaagttaacagccttggcgttacgacggtcgttaggtgtgacatcctctggcttttcaatgccaaaaacacgcatggctgtagaggtatggatatctgccccttctttaaaagcagcaatcaaatgctcatctcccgaaatgtgggcaagcacgcgcaactcaatctgtgagtaatccgagcttaaaagcactgcgtcctcagtcgatgggacaaaagccttacggatgagacgaccttgctccaagcgaacagggatattttgcaagtttggatccactgatgagaggcgacctgtctgagttagatcttgcacataacgtgtatggatcttgccatcctcaaggatataatcctgaagccccaagacataggtagactgaagcttagtgatttggcggtactccaaaatcttagctacgattggagcaattggtgccaaacgttcaaggacatcaacagctgtcgagtaaccggtcttggttttcttagtgtattccaaaggtagtcccatcttttcgaagaggatgacacccaactgttttggcgagttgatattaaactcttcgcccgccatctcatagatttcttgagtcaatttatcgatgactacttggttttccactgccatctcgttaagggtttgtcccttaaccttaataccagcgatttccatcttagctagcacatttgccagtggtaactccatatcaaagaggagctctgattggccgtgttcagccaatttttcaagcatgacaggtttagctacctgaaggaccttgacttttttagctaggtggctgagcaagacctctttttcaggcacggcacgtttagcccccttaccatagaccacttcatctgtttcaagcggcaagtctgtatagagacgggcaatggttgacaattcattgtcctcaacggttgagaggagatacttggccagacgtgcatcaaaattagccgtaggcaagtcaatgcctagatgactcaaaaggaccttactgcgcttgaaatcgtagatattaacagctttagaaagagctgcctggaaggcgtctgatttgaggaggtcagtatctgtagatgcataaatctgcttgtcattcccccaagcaaaaccaatgataggctccgtgtgataattctcaccaagaatttcaagataaaagaaatcatcagggctgaagtgatcttctgtcacttggcttggctcagtataggccacatcaaaatcttgtggcacagcctctccaccaagggcatttttaaactgaacaaagcccatctcgtcataaaaggctgccaatttttcaaggtcaggtcccgtaaaggccgtatcatctaggtcaatttcaataggagactgggtatcaatagtcgccagggtcttagaaagaaaggcttgatccttgtcgttgatgagattttccttcatcttagacttcttcatctcatcgatgtggtcatagataccttcaagggaaccgtgttccaagaggagcttgagacctgtcttttcaccaatcttagtcactcctggaatattatcagacttatcacccataagggctttaaggtcaatgaattgcattggggtaatccccattttctccatgaggtagtcaggtgtgaaggcttcaaactcagccacaccttttttcgaaatctcaacgactgtattttcgtcagtcagctgaatcaagtctttatccccagaaacaactgtgatttggtagttctcactggtattttcagccatcttagctaaggtaccgataatgtcatctgcttcgtactgagccaagtcataataggcgatgccacgtgcagccaacatctcacggatataagggaactgctcacggaattcctctggagtcttggcacgaccagccttatagtccgcaaacatctctgtacggaaagttgttttaccagcatcaaaggctaccaaaacatgggtcggctggattcgctcaagtaggttgtccaacatgaggtggaaaccgtagatggcattggtatgaaggccgttattgttacgaaaacggtcaatttgattatagagtgcgaaaaaggcacgaaaggcaacggatgaaccgtcgattaggagtaattttttctgattagtcataggtttattatagcatagatgggagcattggttttaattgaaaatctcttattttagggagactcttttgtaaaatagtcgttcaaaaataaaaaacttcaaggaaaattgttcagagataaactgtaaaaatagccagtcaacatctgatgacaaaagcccgcttataaaactatctcaagcatttcccacctccaccccccctataatcaaatgtgttataataggagctatgaacacaaagattttagaccaattagaatttaacaaggtcaaggaccagttcacagaatacctgcagactgaacaggctcaggcggagttgcgtgacttggtacctatgaccaatccagaaagaattcaaaatcaatttacagaaattcaagaaatggcagagattttcgtagagcaccatggctttgccattggtagcttgcgagatatttctgagcccttgcgtcgtttggaactggatgctgacctcaacattcaggagctcattgccatcaagaaggtgctgcaagcttctgctgacctcggtcgcttttacgctgaccttgaaaatgtagagctcatcgcccttaaacgtcttttcgaaaagattgaagccttcccaagtctccaaggtagccttcaaagtatcaatgatggtggttttattgagcattttgctagccctgagttgcaaaatattcgtcgtcaacttaaatcttgtgatgatgccattcgccagaccttgcaagacattctcaagaaatctggccacatgttggctgaaagtttgattgctagtcgtaacggtcgttcggtgcttcctgtcaaaaatacctaccgtaaccgtattgctggggttgtgcatgacatctcaagctctggaaacacagtatatatcgagccacgtgccgttatccagctcaacgaagaaattacacaattacgtgcagacgaacgccacgagatggctcgtatcctgcatgaactgtctgatcaactgcgtccacaggctgctgcaattgccaacaacgcttggattttgggccacatggacttcattcgaggaaaatacctctatctccatgataaaaaagcggttattccaaagattagtgacaatcaaacactacaactacttaacgttcgtcaccctcttttggtcaatcctgtagctaacgatttgcactttgatgaggaccttacggccattgtcatcacaggtcccaatactggtggtaagaccgtcatgcttaaaacgctaggactagcacaactaatggctcaatctggtctgccaattttggctgataagggcagccgtgtagccattttccaagagatttttgcggatatcggagatgaacagtctatcgaacagagtttgtcaacattctctagtcacatgacccacattgttgagattctgaatgctgccgacagtaacagtctggtcttggtcgatgagcttggggctggtaccgaccctcaggaaggagctagtctagccatggcaatcttagagcacctccgtttaagtcagattaagaccatggctaccactcactatcctgagcttaaggcctatgggattgagacgcaacatgtggaaaatgccagcatggagtttgacacagcgactttaagccctacctatcgttttatgcaaggggttcctggtcgttctaatgcctttgaaattgctcgacgcctcggtttgaatgagattattgtcaaggaggcagaaaacctcactgatactgatagtgatgtcaaccgtatcatcgagcaacttgaagcccaaactgtggaaacacaaaaacgtctggaacacatcaaggacgtggagcaagagaaccttaaattcaaccgtgcggtcaagaaactctataacgaattctcccatgaatacgacaaggaactcgaaaaggctcaaaaagaaattcaagagatggttgataccgctttggctgagagcaatagtattctcaaaaatctccacgataagagtcaactcaaacctcatgaagttatcgacgccaaaggaaaactcaagaaacttgccccacaagtggacctctctaagaataaggtccttcgtaaggctaagaaagaaaaggctgcgcgtgcccctcgtgttggagatgatatcatcgttaccgcctatgggcaacggggtacccttaccagtcaagccaaaaatggtaactgggaagctcaggtcggtctcatcaagatgaccctcaaggcagacgaattcactctggttcgtgcccaagctgaagcccaacaacctaagaagaaacagattaacgtggttaaaaaagccaagaagacatctggcggtcctcgtgcccgtctagaccttcgtgggaaacgttacgaagaagctatgcaagagcttgatgcctttattgaccaagccctacttaataacatgagtcaggtggacatcatccacggtattggtacaggtgtcatccgtgatgctgttaccaaatatctccgccgtcatcgccatgttaaaagttttgaatatgccccacaaagtgctggtggttccggatgtaccattgcaaccttagggtaaaaatagataagaaagactgagaccttgtgttcagtcttttttcatatgttaccaaaacaaagaacaaaaagcctcccttaatcaaggaagacttctattttctatatcacacttgtccacaagtgctgaataatctgactaactggaaaattccaattaatcaaaaggcgcaaaacccagctagatgacaagaccgtttgaatgttattcatgggaacagtcgcaagaatattcccaaacatagtcaaaggcacaagactcactaaggaggccaagacaccacctaccacttggtaacgtctctgatcaagtcgctcaattctcacaaaatggaagaaaatcccaagaaagcgcaaaccataataagccacacagtaaatagcaaaataggcaacacctgcataatagactcggtcaagcgaaaagatgttctgatctttaaagaaagctatactagcatctttggttggattggtataaggtatccaaagattgatagcctctcctagcgaccggtaaaagtaggccgctacacacatggcaataatgactgaaaccaagtaataagcttgcataaagaggcctcgacggtagccaatgtagaaattccaagccataatggctaagacaaggagtccaatcatgcgtcatcctcatcgtcatttgtagctgtcgccttaaccttgagctgctcaagttgcttagctctcaacgtttccaactctttttccatatcttcaacttgaatttcgcgttccaactgagtcgacaaagaattgatagccattaggatagcgattgtttcattgtcagcatttttcatctgctctttgataattttatatttctcgtgggcaacacgctcaacctcttccatgaataggttgtccttatcagttgttagcgtgaggttcttctctccaaaatgaaatttgtaacggttcttatttgccatttgcttgttagctgccaatcaatggtggtcacggattcgccaccgcagcttctccttattttattgcttttatatcgccatttttagcaagattcagacacttactctgaggcgtgttcgatacttaaatgccaacccattttctctaattgtggaaaaaagagcatggttaggcattctctttctaatcattatatcctaaattttaactttcgtaaattttagactttgcacttctctagaaaaataattttcagggattccgagtctgtaaaatatctaccaattctccttttttgtgctaaaatagattccatgggcacaatcgtattaaaaatgacagcagagcagatttcaacacttcaaaaggacctggcaaactatgcaactgcgactaaaaatccttatgcaagtttttcagccaaggtcgatggaataagtgtcatcgcctatacttcaggaaaggtaactttccaaggagctaagccagaagtcttggctagccgttttggataccaagctgaatctaagcattcacctgatgggcaaaacctagccctaattggatcagatgaagtcggaaatggctcctattttggtggtctagctgttgtagctagtctagttaccccagctgaccatgcctttttgaaatctcttggggtcgatgattctaaaaatcttaatgatatcaagattcgtcagattgcacctatattggaggagaaaattcctcacaaggcacttcttctttcgcctagaaagtacaatgaagtggtcggagacggtaagagtcataatgctgtgtccgttaaagtagctctccacaatcaggctatctttctattgttacaatcaggtgctaaaccagataagattgtcattgatgccttcaccagtgagaaaaattatcagaaatacctcaagaatgaacgcaatcgctttgactttcctatcactttagaagaaaaggctgaagggaaatacttagctgtcgcggtgagctctatcatcgctcgcaatctcttcctggaaaatttggacaaactcagccaagaggttggctacacccttccttcaggtgctggtgctaaatctgaccaggtcgcaactaagcttcttcaagcctacggagatcaggctctccaagctactgctaaatatcatttcgccaataccaaaaaagcctaccaacgattaaaataaccctgaaaggccttaactatgaaaaacaaatggacccaatacttcctcattttacttcgtgaatggggactctttatcctctttatcacatttttcctcttgactcgcctcttcctttggctccctgtccaggttgacggccactcaatggatcctactctagccaataatcaacgtgttatcgttttgaaacacacatccattgaacgcttcgatattgttgttgccaaggaagtcgaagacggtaagacgaaacaaatcgtcaaacgtatcatcggtatgccaggtgataccattacctatcaaaatgataaacttactgtcaacggtaaagaagtcaaggaagaatacctcaaagaattccaagctgcctttgccaaggataagctacaaaaagaatatgcttacaacgatgacaagagcaagagcggctacttccaacaactggctaaggatgccaaggcctttacaaccaatgctgacggtaacacgaccttctctgtcactgttcctgaaggcaaatatttcctacttggggacaaccgtattgtttccaaagatagtcgagtcgttggttactttgacaagagtgctcttgtaggggaagttaaattccgcttctggccacttaataaaattggtaccgttgaggacaactaaaaacactgaataagataaggttggggaaacccagccttattatgtatctaggaaaaacacatgcaagaattttatttttcaggaactatcgaacgcgttattttcgaaaacgctagtaatttttttcgtatcctactcttagaaattgacgaaacagacagtgattttgaggactatgaaatcattgttacaggaaccatgggagatgtcatggaaggtgaagattataccttctggggtcagttaaccaatcatcccaaatatggtgaacaactccaaatgacacgctacgaacggtcaaaaccttctgccagcggtcttatcaagtatttcgctagcgacaattttaaggggattggtaagaaaacagctgagcgtattgtcgagatctatggcgaagacccaattgacaagattctcgaagatcctagcaagttagagcagatttccaacctttcaaaggtaaaccgagaagccttcgttgcaaagttaaaaatcaactatggaaccgaacaaatcttgtccaaactttccagctatggactcacaccaaaagctgcctcacaaattttcaaccaatataaggaagaatcgctcaaccttatcgaggaacacccttatctcttggtagaggaagttcaaggaatcggatttaaaatagctgaccaactggccgaacgcctaggaattgctagtgatgctcctgagcgtttacgagctgccttgattcattgtctgctagaagccagtatggaagaaggcgacacctacatcgaagcaaaagccttgctcgaacgaactatcatccttttggaaagtgctcgccagattgaactggaccctgccttggtcgctaaggaattaaccaatctcatccaagaggataaggtgcaaaatgtagagactaaaatctttgataataccctatattttgcggaacaaggcatctatacccacctaactcgtatcatgaaagaccaacctgacatcagtgctgaggacaaaatccaagcaagtcttgaagaggtggaagaggagcttggtattacttatgataaggtgcaaaaagatgccattatcaaagccctacaaagcaaggtcttcatcctaacaggtggtcccggaacagggaaaaccactgttattaacggcattattaaaacctatgccgaccttcatggtctagatctcaaaaagtctgatttgcctattattttagcggcgccaacgggacgggctgctcgtcgaatgaacgaactcacccaactccctagtgccactatccatagacatttgggactcaatagcgaggacgatttcaagaccttagaggactatctcgattgcgacttgattatcatcgatgagttttctatggttgatacttggttggccaatcaactctttgaaagtatctctgattcaacccaagtcatcattgtgggtgaccaagaccaactgccttccgtaggtcctggccaggtcttggctgaccttttgcagattgatgacttgcctaaggtttctctgaccaaaattttcagacaatccgaggattccaccatcgttaccttagctagccagatgcgccaaggccaactacccgctgatttcacagagaaaaaggctgaccgctcttactttgaggccaatgccaaccatattccacagatggttcctaaaattgtctctgccgctataaagagcgggatcgctgctcaggatgtgcagattctagcccccatgtaccgaggacaggccggtatcaacaatctcaataccattatgcaggacctacttaatcctcaagaaaaggccaatcagtttgcctttaatgatattttcttccgtaagaacgacaaaattctccatctggtcaacgataccgaactcaatgtcttcaatggcgacatcggcatcattaccgatctcatccctggtaaatatactgaaagcaagcaggacgaaatttacatgtcctttgatggcaatgaggttatctatcctcgtaacgaatggaataagattactctggcctatgccatgtcaatccacaaatcccaagggagtgagtttccagtcgttatccttcccatcacacgccaaagtggacgtatgctacaacgtaacctcatctacaccgccatcacacgcgccaagagtaagctagtcatgttaggggaaatcgcagcctttgattatgccgttcgcaacgaaggagctaaacgaaatacttatctcatccaacgttttgaacaaacttatacacaagttgttgataagtctgtcgaaaagattgttaaaaacgagacaacagaggcacccaatcaaacaaaaacgaaaaacaactacccctcagaaacctttgaaaacaaagacttttcgggaaatatcaatccatccccagatcttgttaacacttattcacaacctgtggataagtctgttaacaaacctgtgcaaacagaagaaaactatcgtttaactgaagaaaattggacaactatagatccaatgattggtctcagtgaagacgacattgctgccttttttaacaataactaaaaaagacttggaaagcgactcactaagagcaactccaagtcttttcatttgctaaaatacgaaacgaatcagggccatagatattataccaacgattactgcatagagcagatttttgctcttaaaggctacaattaccgttggcacagtagccaggatttccatccacttaaactgtggcaagtgaccaatcttctcagtcgtgagactagagagaatcagagcaaagaggatagaaactggtaaatagtgcaaaaatcgaacaacgatatctggaagccccttgtatttcactaaaacaaagggaagcacacgaggaacccagctgaccacaaacccaagtagaatagcaatgagaataaacttattgacggccatcacacatcacccccacactacatccaaccaaagtagccactaaaacagccaaagattccgacaagatgacactaaagctcagataagccacagcaatagatagtaaaatcaagagtagcttacgcactccttcccctaacaagacatcaatctgactacttaacaaaccaataaacatggcaatcaaagcaaaatccaaaccaaatagctcaggattaggaatcatggaaccaatcaaacaaccaacaactgatgatacaatccaaaccagatagctaaaaatattgttaccatgcatccagttagcaggaatatctttataatgcacatattctcccaacaagacaccataactttcatccgtaatcagactaccaattcccagctgattccaaaggcttgtttttgtaaaaatcgtcgttgcatgtaaactcatcaacatgttacgcaaattaaccaagaaaacagtcaaggttaactcacctagaccagctcctgcaactactaaggcacacatggcaaactgggccgagccaccatagaccaaggcacacatgaggccaacctcaagggctgatagacccgaagctgctgctacaacaccaaaggctagaccaatagctacatagcctaaagctgtcggtaccgcggcttttacacctaaacgaaagtcagacacactcaattcctttctaaaggaacctcttaccaaactagtaagaggttcttcttattcttcaaatcctgcaaaggctagacttggttttgcattcaagtccaactcagcaaaatgtttttgatcacattcaatagcggctgctagagcaatcatgccagcattgtcaccacaaagacgtaaaggcggaataaccacatctacatctgtgatttcttcagccaaacgttcacgtaagccttgattagctgccacaccacctgcaacaacaagtgtcttgacaggataacgctccaaggctttcttagtcttagctagaaggatatccaacacagcagcttggaaagaagcacaaaggtcttctttaattaggacgtcacccttttgctctgcattatggtgcaaattgatgaaggctgacttcaagcctgaaaatgaaaactccaagtggtcttccttaatcatagcgcgtggaaaatcataaacatctttccctttatgagccaattcatcaatttcacgcccagctgggtaggtcaaccccatcacacgcccgaccttgtcataggcctcaccaactgcatcatcacgtgtctcaccaacaatcttgtaatttcccggttctgacacataaaccaactctgtgtgccctccagacaccaaaagcgctaagaggggatattccaattcttgaacctcacgcgccgccataagatgtccagccatatggttaactggaatcaaaggcaatccgtgtgcccaagcgaaggccttagctgctgccatcccgaccaagagcgccccgaccaaaccaggaccataggttactgctacagcatctagttgttcagcagtaattcccgcctcagaaagggcatctttaatgcaaagagttaccacttccacatggtgacggctagccacctcaggaacaacaccaccaaaacgtttatggctttccacctgactggcaataatattacttaaaagttccttctcatttttcaaaacggcaactgaagtctcatcacatgagctctccactgccaaaatatatctatctgccattagacttcctctcgcctcatgataactgcatcttcttgaggctcatgataataatttttccgaattcctagactttcaaaaccaaattttctataaagtgcctgagcgacttgatttgaagacctcacttctagaaatataggctcactacgctcttccaaatgattcatcagctgactagcataaccacgcccctgataagcttttaaaacggcgatattggtcacctcaagctcacccaccaaattttgaagggctaaaaaaccaacaacttcttcctggtcataaacatagaaatactcagtagtatccaaagccaagtccgctaccacttgttctatcgtccacggagatttgtcataaacatccgacaaaatccgataaatcagttgagcttgctcttggctactcaatctagacgcgcttgatgtagttgtcacggttagtctcctcatgcgtcttaagccaattctcttccgcctcaacccgcttcaagtaatatggaacaaaagcatccacatcaacagaaggcaaggacaagcctaaacgaccaattaactgggcagacggaagacttgacaagatagttgcttctggaaggctttctttaatctgatccacaaaattagccacttcaccgacaaatgtcaccttttcaaaagttttagcttgctcaagaacatctacaaaagctgcatggcaatctgggacgagggcctgaccattttcataaaaaccaacgtaaacattattacgacgggcatccataataggaatcacaacaccgtcaaccgaaaggtctgtcagtgcctgtaggcttgaaactcccaccaaatcaatgtcgagcgcataggctaaagtcttagctgttgcgacagccacacgaagccctgtgtaagaaccaggaccctgtgcaaccacaatacgttctaaatcagacggttgccaacctgcctgagcaactaaaaaatcaatggttggcattagactaatactgtggttcttttttactgtgacagttgactctgccactagtttctcatcttctaacaaggctactgataaagctgtgctagaagtatcaaatgctaatattttcatcttttttccttgtttccttttatgcttttctattataacacaagtcactgtttcccagaaacgaacattttccaactttttccgccattttctttatctagcccctatcttatggtacaataatagtaattgttaaacgaatcaaggctactagctattactcataaagtgaatatcataacgtcaagtaaatcatagaaagattaacttgaccggtttttttatagaatggcagagccttttggaaagaaaggaaaaccatgatttataaagtcttttaccaagaaactaaagagcgtaatccacgccgtgaacagacaaaatcactctacctagatatcgatgcagaaactgaacttgagggacgtatccaagctcgtcaaatcatcgaaaaaaacactgcctataacatcgaattcatcgagctcctctcagaaaaagcccttgaatacgaaaaagaaacaggcgtttttgaagtaacggagttctaagaccatggcatcaaaaatcaatctaaaacctgaagaagttggggtttatgcgattggtggtttgggggaaatcggtaaaaacacctatggtattgaataccaagatgagattatcatcgtcgatgcgggtattaaattccccgaggatgatcttctcggaatcgattatgttatcccggactattcttacatcgttgaaaacgttgatcgtgtaaaggcacttgtcattacccacggtcacgaagaccatattggtgggatccccttccttcttaaacaggcaaatatcccaatttatgcaggaccacttgctcttgctcttatcaaaggaaaattggaagaacacggactacttcgtgacgcacaactctatgaaattaatgctaatacagagcttactttcaaaaatatgagcgtgaccttcttccgcactactcactcaattccagaacctctcggtattgtcatccatacacctcaaggtaaaattgtttgtaccggtgactttaagtttgacttcaccccagtaggtgagccagcagaccttcaccgtatggctgcacttggtgaagaaggcgttctttgcctcctctcagactcaaccaatgctgaagtaccaactttcacaaattccgagaaggtcgttggtcaatccatcatgaaaattattgaaggcatccacggacgtattatcttcgcctcatttgcctcaaacattttccgtctgcaacaagctgccgaagccgctgtaaaaactggacgtaagattgttgtcttcggacgttctatggaaaaagccatcgtcaatggggttgaactaggctacatcaaagttccaaaaggaactatcattgaccctagtgagatgaaaaactaccatgccagtgagattcttatcatgtgtaccggttctcaaggagagcctatggcagcccttgcacgtatcgctaacgggatgcaccgccaagtgacactgcaacctggtgacactgttatcttctcatctagccctatcccaggaaatacaactagtgttaaccgcttgattaatactattcaagaagctggcgtcgatgttatccacggtaaaatcaacaatatccatacctctggacacggtggtcaacaagagcaaaaactcatgcttcgtttgatcaaaccaaaattctttatgcctgttcacggtgaataccgcatgcagaaagtccacgcaggccttgctgttgattgtggtgttccaaaagataatatctttatcatggaaaatggtgatgtcttagccctaacaaaagactctgcgcgtcgtgcaggtcacttcaatgctcaagatatctatgttgatggtaatggtattggggatatcggagctgccgttcttcgtgaccgtcgtgatctctctgaagatggtgtcgtacttgccgtagcaactgtcgacttcaagtctaagatgattctagctggcccagacatcctcagtcgtggcttcatctacatgcgtgaatctggcgatcttatccgcgaaagccaacgcattctattcaatgctattcgtatcgctcttaagaataaggatgctagcatccaatccgttaacggagctatcgtcaatgctttacgtccattcttgtatgaaaaaacagaacgtgaaccaatcattattccaatgattctcacacctgataaatcataaccacccgtctaatgatatgccccctgtcaagtagacaggttaaatatctaaaaaagtgtctgtttttgaaggtcagtcgtacataataaatgtacggctgtttttttatgcagaccacttagacttgtacttttcaattttgttattcttagcgattgggtatgacaaaggatgttctgatgataaggcagcgtttcttactgccaaaggcgttttacagtcatacctactttgtggacgctcttgacagtaaaatcggatatagtctttgatggcatatcggagggaggcctcatctgaaatctcatacatctgatacatttccgattttataattccccaaaaaccttctattggtccgttatcaatacaatggcccactcttgacatggattgaatcatatcagtatctttcagctttttttgaaagttcttattggtatattgaaaccctctatcgctgtgaaatataggcttcgctgcgggatttttttcaatggctttgtcaaatgttttgaagaccagccgattgtcatttcgaccacttatgacaaaagcaataggatagcggtcatataaatcaagtatgacactaagatagagtttcttatgagagttaggaatcttaaactctgtaacatctgttacccattttttgttcggagcagttgtatagaagtttcttgccaacttattttctgcagtttctttaggcttggcagtcttgtattttttccttttcttacggataaaagcgtggatatcgagtactttcataattcggtgaattctctttcttgagtaattcgtatgattgaaatgattgatccaatcggtcattcttcggtatcccaagatgtgtgaaaaacgttcgtcatattctttaattaattccgcaatttcgctgtttaattgttcttgttctggaactattctatgtttccatttataaaatgcagacctcgtaatgccgagctgatgacacatccagctaatgctccaccctttgttggtgttgaagtcttcgatcgctaagtattttgattcgtggcgctgtttgcctagcctcacatccttccgaattctttcactttttttaagagttcaacagtcatatccttttcttctaactgacgttttaagcgcacattttctcttcgtaaacgttctaattcatcaacctcatcatctagtttgtgatgaccccttttgtcaactaaaccttcttcaccatcactatcatactttttcacccacgaatacacttggctataagaaacatcataaagtgatgccgtttccttataattgcgattatgttcaatacaatagttgacaatctctttgcgttcatcaatagtggttttacgtcttgcttttgccatatagacctcccgttttggattgtaatccttaagttctatattggcattatacatcctaatccactttcttaaaagtcctgaagaaatatcatactgatgacctaaatcaatagatgaagcctcaccactaatacatttttctacaagttccattttaaattcttttgaataggaacggttttttgttttctttgtgaatcctaaaatcccatattttttatagatggcagcccaatcttgaatcgtccttgtggaaatatggagacagttacatatctcagatctggaacgattaccattaatataatcgagacaagcttgttctttctcgtatggggtgaacctttctcttctagacataaaaatacctcttaagtagattttaggtatttaccttgtctacttaagaggtatcatatcatagcgggtggtttatttgtttcgcaccttcggagcgaaacggacttaaagtcacataataaaaaaatggtagccatctagctaccattttttaagtttaaatccagtctagagcacaccattctagcaagtaaaaaagcgctataagcgctttttttcattttatgcacctggataaatgtaagatactgaacctggtgtagttgagttttgtgggtcaaaccaaccacgatagttattgatttgttgctggttgttatagtttgactccaagatctgaatttgaccatcttgaccaacttctgttacataaccaacgtgaccatagccaccatcagtccaacatacaattgatcctgtcacaggtgttgaacctacagcataaccttggctagcagcgcttcctgcccaatcgccaccattaccccaccagttacttgcccatggagcaacttccttaacaccccatgtacattgaccaactggataacgattccaagtagcatctgaatcagtagctgctacctctgaagaagaagcttctgttgtttcctcaactgctgtcgtagcacctgaaacttccaagcttccaccaggaacaattgttgaccaaatagtcatgccattttcagctgccaattgataaggatctaccccatactgactagcaattccgaagaatgaatctccattttgaactgtataagtatcagcattaactgtttgtgcgactgtaagaccgagcaataatgcacttgaggctgctgccaaagcggctttttttgtagttttcatatttccccctgaataagattaatataaaattagtttaacactctcatattttaatgcgattaagggggaataaagaaatatgacaaaagaaaacagctcagttaaaactacgtaatttgtccaagaacttaataaattaaaaagaaaaagaaaaccaggtataacctgattttcaaatttaatttcttaataaatgtccaagtagttatcaatttcccattgtgaaacaaaggtagcataacttgcccattccatacgtttcgcatcaaggaagtttgtatagatatgattacccaaagcttgacgaaccacttcatctgtttccaatgctttaagagcgttacgaagtgttgatggcaaatcaataataccagcctctttacgttcttcaggagacattgagtaaatgtttgtttcaactggatctggagcatcaatcttgttgataataccatcaagacctgcttccaaaagtacagcaagtgccaagtatgggtttgccattgggtctactgaacgcaattccaaacgtgtacccataccacgagacgcaggaacgcgaatcaatggtgaacggttgctacctgcccatgcaatatatacaggagcttcgtatccaggaaccaaacgtttgtaagagttaactgttgggttaataattgcagtatagttatatgcatgtttcatcaaaccaccaaggaagtagtaagcatcttgagacaattgcataccacgtggatcctctggatcaaagaatgcatttccttcttcagtgaagagagacatgttacagtgcataccgctaccagcaataccatatttaggtttcgccataaatgtcgcataaagaccatgtttacgagcgattgtcttaacaaccaatttgaaaatttggatattatcacaagccttcaaaacatctgtatacttgaagtcgatttcatgttgaccaacagccacttcgtggtgagatgcttcaacatcgaatcccatttctgtcaacacattaacgatttcacgacgtgtgttatctgcaaggtcagttggtgcaaggtcaaaataaccacctttatcgttaacttcaagtgtaggattaccttgttcatctaatttgaaaaggaagaattctggttctggtccaaggttaaatgatttataaccaacttcttccatatgacgcaaagcctttttcaagttaccacgagggtcaccagcaaatggttcacctgcagaggtatagatatcacaaataagaccagctactgcaccattttcatcaccccaagggaaaactgtccacgtatcaagatctgggtaaagatacatatcagattcgttgatacgaacaaatccctcgattgatgaaccatcaaacatagctttatttgaaagtaccttatccaactgttcatctgtcgcaggaatttcaacgttcttcataacaccaagaatatcagagaacattaaacgcaagaaagtaacattcttctctttgacttcgcgacgaatatcagctgctgtgattgccataataggggtctcctttataaaaaccaaaaataaaagttcaaagcgtaattagatacgcaagttaccaaattgttgtgacggggtcgtaaaacggccttgctgaaggagttcatcatgcaagatacgtcgaacgtccgcatctgttaaagctgcttgtttttgttgtgcacgaacttcacgctcttcgtactcatgcttaatcgctgcaatattgtaaccatcatccaaaaaatctttgatttccaataaacgatccatatcatttaatgagtacatccgacgatttccagctgtacgttcaggttgaattaaaccttgatcttcatagtaacgaatttgacgagcagttaaatctgtcaatttcataactgttccaatcggaaaaacagctagagaacgccttaattctttctctcttgccatgatcatcctcctttcctaacaattatattctgaatatttctacatgtcaacagtttatgttactttttcttacacaacgagcaattcccgaacattatattgtgtattcgctctaatttaatgattttatcaaaaaaacataaaaaatagagttcaatagaaccctatcattcttattttaaatgtttaagtagccaatcataatcataattgacaaggattgctataaagactccacagaaagtttcaaagactcgagcaataacataagtgaaggtattatcaggtggaatagacaaggtaataatcagaagtgcagctactcctccaataacaccagatgcattattaaaggacacattaatgacaatcgtcagcattgtcaaaattggaaccaatagcaaggtaacccaaactgaatgattaaaccacatatttacaaagtaaaataatagcgacaaaagccctccaaccgtattcgcaaaaatacgtgatttaccaaactgaatacttctgtcaaagttttctcgaagactaaagactgctgtcaaacaaccaatctgaagcccttcccaccctaaagcagaaaaaagacctaaaacaagaaagacagcaatccccgtcttaagtgtacgcataccaaatttaaattttttcggttcaaatttcaatcccattttactattttaacatgattatgaaacttttggctacttctacagtattatgacgcaaagttcaaactaataatcgcaattttttgagagaaatttacttcccaataataattttagcctctatcaaatattcaaagagatgacacaaaaaagagttggtttcccaactcttttcattctaatagacttatttatcagtaagtgcagccaatcctggaagttctttaccttcaagaagttccatagaagcaccaccaccagtagagatccatgagaatttgtctgcacggccaaggttgatcgcagcagcagctgagtcaccaccaccgatgattgatttaacgcctggttgtttcacgatagcgtccatcacaccgattgtaccagcttggaagtcagggttttcaaatacacccataggtccgttccatacaactgttttcgcaccagtcaattcttggtcgaatttagcgattgatttaggaccgatatcaagaccaaggaatcctggatctactgcttcaccttcagtgtctttcacttcagtgtagtcagcaaatgcgttcgcttcttttgagtcaactggcaagatcaatttgccatttgatttttcaagaagagctttcgccacatccaatttatcttcttctacaagtgagttaccgatttcgataccttgtgctttgtagaatgtgtaagtcatcccaccaccaataaggactttatcagctttttcaagcaagttttcgataacaccgatcttgtcagatactttagatccaccaaggatagctacgaatggacgttctggagcttcaactgcttctttgatgtaagcaatttcattttcaagaaggaatccagcaacagctttatcaacgtttgcagagataccaacgttagatgcgtgtgcacggtgagcagtaccaaatgcatcgtttacgaagacaccatctccaagtgatgcccagtatttaccaagttcaggatcgtttttagattctttcttgccatcaacatcttcgaaacgagtgttttcaaccaagagaacttgtccatcttcaagagcgttaacagctgcttccaattcagcaccacgtgtaacacctgggataaatttcacttcttgacccaatttagcagccaagtcagcagctacaggagcaagtgatttaccttctttatctgcttcttcttttacacgtccaaggtgagagaagaggattgcacgtccaccttgttcaaggatgtacttgatagttggaagagctgcagtgatacggttatcgttagtgatcacgccatcttttacaggaacgttgaagtcaacacgaacgagaacttttttccctttcaagtcaacgtctttaacagtcaattttgccattagatatgactccttctttttttaatacatgataattatatcacaaaagctgtaaaagaggtagaaaaatcagaaggatttctagcttattgcgagtataagacatttagcatataatctaaatagaaaggtcgaatatccatgaaaaacagctaaacaagaagcagaaacaagctgaccatgatctaaatgtaatccttattcttacccttgttcctctgctcctctttcttactcttaaaccaactcttttttcatacactaaccaaacctcagtaccgctatggctgcgattaatcttattagctagttgtcaatttgccatcgcaggcttaggaaccagcactgttatgctttatcgcaaagaatctttcagacactttggattaatcaccaaaaatctagttaccaccctttttcaatctcttcttgtagccctaccacttatcatatttaaaggaattactcatcagattcattcctatctaccgcttcaatcaatacaattaacaaaagaagtaatgagccaatcatttcctagtaatatcctgacatacccattcatctgtcttatttggggattctaggaaggatttaactatgtagtcatcgctgaaaagatacgcatacgttttccatctccttacatttggttagatagtggggcaataacttgtgcgattttttgcctccttatccatggaattattggttttgatatctataccctatttgaatcacttaccgtttttatacttatttatggtatgctagctatacaaaaacataataaaaactcctggggttgtgtcctgctctttctactcatttggaatgccttctagcttattcataaatcacaatcctactgagattataacagcctatttatacggctgttttattattttggaaataaaaaaagagccgaagctcttctttttatacaattgaattatttagcgattttcgcgaagtattcaagagtacgaacaagttgtgaagtgtaagacatttcgttgtcataccatgaaacaactttaaccaattgtttaccgtcaacgtcaagaactttagtttgagttgcgtcaaacaatgaaccgaatgacatacctacgatatcagaagatacgattggatcttcagtgtatccgtatgattcgttagaagcttctttcatagctgcgtttacttcatcaacagtaacgttcttgtcaagaactgctaccaattcagttactgaaccagttggaacaggaacacgttgagcagctccgtccaatttaccgttcaattcagggataaccaaaccgattgctttagcagcaccagttgagttaggaacgatgttagctgcagcagcacgagcacggcgaaggtcacctttacggtgtggtccgtcaagaaccatttggtcaccagtgtaaccgtggatagtagtcatcaaaccttcaacgataccgaagttgtcatgaagagctttagccattggagccaaacagtttgtagtacatgaagcacctgagataactgtttcagtaccatcaagaatatcgtggttagtgttaaatacgactgttttaacatctgatccaccaggagcagtgataacaactttcttagcaccaccagcatgcaagtgtttttcagcagctgctttagtagcaaagaaaccagttgcttcaagaacgatttctacaccgtcgttagcccagtcaatttgttctgggtcacgttcagcagaaactttaacgaatttaccgttaacttcaaatccaccatctttaacttcaacagtaccgtcgaaacgaccttgagttgtgtcgtatttcaacaagtgtgcaagcataactggatctgtaaggtcgttgatgcgtgtaacttcaacaccttctacgttttggatacgacggaaagcaagacgaccgatacgaccgaaaccgttaataccaactttaactaccattagtgatttcctccttatgaaaatcaaataaatataattttgagagcaagctctccctattgtgaaaagattaacttgaacgctttcaattcaacctttcaacagtcatattatataatttttttcaaaaaattgcaaatagaaaaggcacttactttcataagtaccctaactttataagttctaattaagcttcaccagaatttttcttgatgatttcttcttgaactgatttaggaacatcttcatagtggtcaaataccatcatgaatgtaccacgaccttgagttgcagaacgaagtgttgttgcataaccgaacatttcagcaagtggaacatatgcacgaacgatttggctgttaccgtgtgcttccataccatcaacacgtccacgacgagctgtaacgtgacccataacatcaccaaggttttcttcaggaacagtgattgttacaagcatcattggttcaagaatagttggttgtgcagtcttagcagcttctttaagtgcaagagatgcagcgatcttgaaggcagtttcagatgaatcgacatcgtggtatgaaccatcgtaaagtttagctttgatgtcaaccattgggtatccagcaaggacaccgttagccatagattcttccaatcctttttctactgcagggatgaattcacgtggaaccacaccaccgacgatagcattttcgaattcgaaacctttaccttcttcatttggagtaaattcaatccaaacatcaccaaactgacctttaccaccagattgacgtttgaagaatccacgtgcttgtgttccagcacggaatgtttcacggtaagatacttgtggagcaccaacgtttgcttcaactttgtgttcacgtttcaaacggtcaacaaggacatcaaggtgaagttcacccataccagagataactgtttcaccagtttcagggttagtttcaacacggaatgttggatcttcttcagcaagtttttgaagaccgatacccatcttatcttggtcagctttagtcttaggctcaaccatcaattggataactggttctggaacttcgattgactcaagaataactttagctttttcatcagtcaatgagtcaccagttgtagtatctttcaaaccgatagcagcagcgatatcaccagcgtatacttgttcaatttcttgacggctgttagcgtgcatttgaaggatacgtccgatacgttcacgtttacctttagatgtgttcattacatatgaacctgattgaaggatacctgagtaaacacggataaatgtcaaacgacctacaaatgggtcagtcataatcttgaaggcaagagctgcaaatggctcatcatcagatgctggacgagtttcttcttcgtctgtatctgggttgatacctttgattgcagggatatcaagtgggcttggaaggtaatcgataaccgcatcaagcatcaattgaacacctttgttcttgaaggcagaaccacaaagaactgggaagaattcaacgttgattgttgcacgacggatagctgctttcaattcctcgttagtgatttcttcaccttcaaggtatttcatcatcaaatcttcgtcagtttcagcaactgcttcgatcaatttttcacggtattcgtttgcttgatcaacgtaatcagctggaatatcttcttcaagaatatctgtaccaaggtcattagtatagatttcagctttcattttaatcaagtcaatgataccacggaaatcatcttcagcaccgattggcaattggattgggtgtgcgtttgcttgaagacgatcgtgaagtgtgcttactgagtaaaggaagtctgcaccgattttatccattttgttggcaaatacgatacgtggaacaccatactcagttgcttgacgccaaactgtttcagtttgaggttctacacctgattgtgagtcaagaacggttacggcaccatccaatacacggagtgaacgttgtacttcgattgtgaagtccacgtgtcctggtgtatcgatgatgttaacgcggtgaccatcccattgtgctgttgtagcggcagatgtgattgtgataccacgctcttgttcttgctccatccagtccatttgtgatgcaccttcgtgagtttcaccgattttgtggattttaccagtgtagtaaaggatacgctctgttgtagttgttttaccggcatcgacgtgggccatgataccgatattacgagtttttgcaagtgaaaattcgcgtgccattaggtttattctcctataaatattttagtttacttatttattataacattattgtcaaaaaacggataggcaggacctacccgttttttcactaatatttaactggttttcaaatgatatgaataatattatttgaattcagagtcagcctattacaaatccataatcttagcttatgaatatatgactgtaattcagcttgaaacttatgattaccagcggaagtgtgcaaaggcacggtttgcttcagccattttgtgagtatcttcacgtttcttaactgatgcaccagtgttgtttgcagcatccatgatttcttttgcaagacgatctttcatagtgtgttcaccacgcgcacgtgatgcgttaaccaaccaacgaagaccaagagttgtacgacgttctggacgaacttcaactgggacttggtagtttgaaccaccgacacgacgtgcacgtacttcaagtacaggcatgatgttgtccatagctgtttcaaatacttcaagagcatcgtttccagttgcttctttgatttgctcgaaagcatcgtatacgattgttgcagcagtaccacgtttaccgtcaagcattacacggttgataagacgtgtaacgatttttgaattgtacaatggatctgccaatacttcgcgtttaggcgctctatttttacgactcattttatcttatctcccttcttatcctttaggacgtttagcaccgtatttagaacggctttgtttacgatcagctacacctgcagtatcaagtgcaccacggacgatgtggtaacgtacccctggaaggtcttttacacgtccaccacggataagaacaacgctgtgttcttggaggttgtgtccgatacctgggatgtaagcagtaacttcgataaggttgctcaaacgtacacgagcgaatttacgaagggctgagttaggtttcttaggtgtcattgttccaacacgtgttgcaacaccacgtttttgtggtgaagatacgttagtttgaacttttttgtggctgttgtaaccaacgttcaaagctggtgatttagattttacaacttttgattgacgtggtttacgaaccaattggttaattgtaggcatctacattctcctgtgtttttttatttttggttgatatggcacttggtgacagcccatatctgtgtgtacttttgcaacttatgtcagcacgtctctgtacacttttgagagaccaaaagtaaaaagtaccgtctaatatagtatcattttttgataattattgtcaagactttcttgttaaaaagaaaaattcctaatcgttaaattaggaatactatcgtagattaattatttgtcaaaaatattaccgacttcaacttctaccttctgtgcttttacatcaatgtcagaaacagtaagtagggatttatattcatggatatcacggtcacctttagcattttctgcgaatacagctacacctactaactcactatcaaattctgaaagcaagctaatcatacccgtaatggtaccaccacctttaagaaaatcatcaacaataaggacgcggctatttggtttcaaactacgttttgaaaggaacatcttttcaatacgatcacttgaaccactaacatagtttaccgatacggttgaaccttctgtaattttcaagtcacgacgaacgataacaaatggaatgttcaagacatctgctactgcatttgctaaaggaactcctttagttgcaactgtcataacggcatcaattttttgccctttaaaggcactggcaatgatacgaccaacatttttcaaaatagacggtgtactcagtaaatcagataggtagagataaccacctggtaagatacgatcactctcggaaagacgtttacaaagatcttcaaccagacttcttgcatcttcatcagaaatagttggtgtaaacataacgccaccagatgcacccgttactgtttcgatttctcctatttgactttcctcaaaagcttttttaatgatagcaacatcttctgagattgaagactttgcagcttcataacgttctgcaaaggtgttgaggcttgtcaattgataaggattattaatcaggtagtttgaaatcactaccatgcgctcacttcgttttaatttcatatgttacctatattttctgtactttttaactattataccataatacagcaaaaaacgaacattttcatataaaatgctcgcttaatttcgattttaatcaaattttggcttgtagaaagaacgattatccatagcaaagagacgatttgtcatttctcctggacctactaggttaagggctgtcgtcatcatcatcatactggcatcaagattatcaatcatatgaataatttctgcttccataatacgaggtcgcactgggctaccatactctagttgtccgtggtggctgagaataacatgacgcaaaacaacgacatcctcacgcgtatcatcaatattgagctccatgagcaccttagtgatttcttcatcaatcaaagcaatatgaccaatcaagtttccacgaaccgtatactcagtattttcaggaccagtaagttcaataaccttagctaaatcatgaagcataattccggcaaagagtagactcttattgagctctggataaatatctccaatgctgtccgctaagcgaaccatagtagctgtatgataggctagtccactttcaaaggcatgatgatttgttttagcagctggaaaagtgaaaaactctttattatactttcgataaagggcacgaacaacacgctgccaagttgcttcctcaatcttgaaaatcatttgctctaggtattcgcgtacttcggaaggatttactggtggtttctctttgaaatcagctggatcatttggctcaccaaatgtaggcaagcgtaaggtaatttggtttacctgaggagtattattataaacctctcgacgtccctccatatgcactactttacctgcggtaaattcttcgacattataaggttgagcatcccataggttgcctgaaatctctccagtatcatcctggaatgtaaaggcaatgtaatcctttcctgctcttgtcttacgtacctctgcacgcttaatcagataaaaaccttcaaaatactcgtcttttttcatttgattaatcttcatgcttgtcctcgttttctaatcgtggtaaatccaacaaactttgtgtcgcactgtcttgataggtttcaattgtatcaagagctctaacaattgccctactccttgtgttaagaagactatcgacggttttacttgctgtattcaattgtttctgagctttagctaacatatctccaaacctgccaaactctagtttgacgttgcctaaaatcttactaatatcatccgcattcttttgaatattcaaagttctaaatcctacagacaatgaattcaagagtgctgataaggttgacggacctgcgataacaatattctcctcgcgacgaagggcgtcaaagaaggccggttgacgtactacctcagcataaagtccttccgtcggtaaaaataatataccaaaatttgtagtttcaggtgggttaagatacttcttgttaatatcctttgcaaatcgcttaatactagtcagaagtgacttacggtgattctcaatctcctctttattaccagactcataagcatcttccagacgatagtaatcttccaaaggaaacttagaatcaatgggaaggtagatatattcatctttatggtttcctggcattttgattgcatattcaactcgttcacttgaacctgataccgtaggaaattctcgctcgtactgattaacagtcaatatgtcttcaataatttgccctaattgaagctctcccaaaatacctcgtgtttttgtatttgaaaggaccttgttaagacttccaacatccttggctacatttttcatttcccccaagccctggttaaccgactctaattgtcttgaaaccgtctcaaaagaggcttgtaaacgtgtttgtaaggtttgctcaagtttctcttcaactgtctgacgcatttgttccaaacgtttctcattggaatcctgcatatctttaacagctttggttaagctttggtttatttgctcaagacgttggtcagaacggtctcgattatcagacaaattttgatgtaaaacctctcggatatctgtcaactgttgatatagttccatctgcaattgattcaattgctttgttgtttccagttggtttgtcttagcaaaactttccaattgaaacgaaacttgatctgaaagattatctgcattttcttccaaactcttattaatctgttcttttaactccatattcttcaagaaaagaacaataagaatccccaagcttaataaagttaaaagtgaaagtagatagatcatactaactcctatctttagtctggatgacaatcacatatccatttggcacaagcacttgaataggaccatcaacgaattcattgctagaatagattttcttttggaaataattcatactagttaattcgtattttgctcccaaaatcgtcagttctccatcaccttcatgtaaaaaagaaacatatgtcattccgggttctggtaaaactttatgacttccttctggataataggtaatcttattttgcttatctcgcaaacagatacgcctcataaaaggagctaagccaggatcgctgaccaaaaatatatttgataacatatgatcaattctgccaccaaaagcaccgaaaatagttacttccgcctcaggatataactgaaatataatttttaaggctaactctgtatccgtatcatccttttcagctggagcaatcatacaatctttggcagctgattgaatcatctttaactctgaccgagatactgaatcaaagtctccgacagccaaatcaataggtaaacctaactccaacaaacgtaagcatgcgcgatccaccccaacaaaataatcaaaatcggtagtgaaccactctagctcaccaccgacaaataaagctattttaggcatcgatagcatcacgaagcgtttgaacttgcgctgtcaaatcaggatttttgaagaggtaagagccagctacaaaaacattagcccccgccttggcacatgctgcaatagtgttattatctacaccaccatcaacttcaatatcgaatgaatagccacctttttcacgaagctccacaacacgctctactttagacatcatttctggaatgaacgcctgaccaccaaaacctggatttacagtcatgataagtacttgatccactaaatcaagtacaggaataagtgcctcaactggggttccaggattaatcacaacacctgctttcataccagcagctttgattttctggagagcaccatggatatgcttagtggcttcaacatgaatggtcatgatatctgcaccagcttgtgcataggcatccacataacgctcaggatcaacaaccataaggtgacaatcaaaaactaacttgctatatttacgcatgctagcaaccacatctgctccccaactgatattaggaacaaattgaccatccataatatcaatgtgaacatattccgcacctgatgcatcaatacgagctagttctgaagcaaaattagcgtaatcagcagctaggatagaaggagcaattttatatgacatgagatacctactttctttttacagtttttttatatgtttcacgacgattttcaatttcacttaaaaattgaaggtaattatcataacggacttgccagatttggccatcttcaacctcttccttaacagcgcaagaaggctcatgggtatgagtacaagaacggaatttacagccatgactagcttgacggatttccggaaaagcttcactcaagtcctctgcattatccacttcataatctagcgatgagaatcctggtgtgtcagcaatcttcccaccatgaacgtcataaagacttacagcccttgtagtatgacgtccacgacctagactgtctgaaatctcacctgtttctaaatgtaactgcggggcaatacggttcaacaaggttgattttccaacacctgtctgtcccataaagactgttattttatcagtcaagagcggcaatagttcttccaaactgaagacaaaatcaaaaccaattttttgatactgtttttgaatggccttcatttctgaatcatcttcaaccaaatccatcttagaaatatagattacaggctttatatttttatgctctagtaaaaccaaaaaacggtccaaaagattactattaaaatccggttccttagcagacataataaccacagcctgatctatattgacaatgggtggacgcactaaactattgattcgttgaccaattttaaggatataaccttctgaattttcctctgctgaaaattcaacaaaatccccaacataaggtgtttgtcctttttttctaaaatttcctcgtgcacgcgtctggtatacaacaccatcatgctctacataatagaaacctgccaatgctttgataattcttccttgcaagtgaactcctcattcgtttaatagccctattatatcacaaattagaaagcttttctggaacaaaaaaactgatcttccatttcccatggacctccttgcattttcaatagattgcagtataataggcatatcatctgcggaggtggtggaatggcagacacgcatgcttcaggcgcatgtgctttttcaagcgtgagggttcaaatccctttctccgcatagctaaaaatcccactgaatctcagtgggatttttgaattataggcctgcttctctcaaagcatctgataagtgtgcaaaatcagaaatagataaagcctctccacgaatagaaggttttatatctgcaatttccaaagccttctcaagtttggattttacttcttcagatttaccaaaatgatttgttaaattattccacaatgtcttacgacgatggacaaagctagccttagccactcggaaaaggaaatcctcatctttaacttcaaccaacggttgttcacgacgcgtcatcttcaaaatggctgagtcaacattaggggctggtacaaagactgtacgagggacaatgaatgccactttagcagtcatataatactgaacggcaattgatagagaaccataagccttgctattaggctctgcagaaatgcggtcagcgacttctttttgcatcataacgacaaattctgcaaaaggaatcttactctcaatcaaatgcatcaagattggcgtcgtaatataatatggcaaattggctacgaccttaattggtagttctggatttttaaattcttttacccgtgtctgtaaatctgccttgagaacatcttcattaatcacgttaacattatcatgatcacgtaatgtatcctccaaaatcggaaccaatcgatcatcaatttcaaaagccataacttccgcagcattttcagccaagaattctgttaatgctccgataccaggtccaatttcaatcacattgacatttttatcaatctctgccgtatcaactattttttgtaaaatatttgtatctgttaagaagttctgtccgaaagacttcttaaaggtaaagccatggcgctcaaggacagccttggtcacgctataatctgcaattctcatttattctcttttcttattaatttcacgatttttatatttggacacaaaacaagtccaaattcttaattatcccaacctctataataaactacttaatagcgatttgattttaagattactggtagtctaataatttgacatagcctcttctagctcctctagagtaattccaaacaattccaaacgttttagaagctgctttccattgcaataaccaatacgaagcgcctcgcccaaatattctcgacgctttcgactatctgctcccattagtagtcctaacttcataagatttgatttactaatatcaaactgattatcatcatcgtaactacctagaactccagataaggccttttgaagatcctcaaaactcgcatgctcaacacccaatgaacgacctttagtcttagattttggtgttgcttccccacggtttaaaaaagcatgctttgctgtcggaacagcttccatgatgattttacggatacgttcaccattatagtctggatcagtaaaaacaatcactccgcgtaagtcattaagcttatcaatacgctctaagtcgtcttcattgatagcagagcctctagtctcataggtatccacctcataaaaacgtctcaaatttgccgtatcatccttaccttctaccacgatgacttcttgaatttttattttattcatccagcccaaaaatcctcatcgcattatcataggtagccctagcaacctctgcacttgttaaaccacgaagctcagcaatcttatctactacgtaacgcgtatagcctgtacgattctcgcgaccacgtttgggaacgggtgccaaatacggtgcatccgtttcaaccagaatcttatctaaaggtaacttctgagcagcttcttggacatccaaagccttcttaaaagttacaacacctgaaaacgaaatcatcattccaagatcaacaaatttttgagccatttctagggatcctgagtatgagtgcataatccccccacgaggaccgacaccaacttctttaataatagcgtaagtatcctcaagtgcatcacgtgtatggacaacaaaaggtaaattgtgttcctttgacaaagctatttgacgcttaaagacatcaatctgaatctctttaggatcttccatccaataataatccaaaccaatttccccaagtgccactactttcggattatccaattgtgatacaatcatatcctcaatttcctgagaataggaccctgcttccgtaggatgccatccaatcgtactatatagttgatcatacttctctgatagtgctaaagatttatcaattgttggcttatcaaaaccaacaatattcatttttataacacctagttcagctgcaaaatctatttcttcttgttcttttcctgcaaaattatccacattaaggtgggtatgcgtatcaaaaatttcaatcataggtctattataacaaaaacgagcgagcatagctcactcaccttttcattttattaaacaaagagtcgcatatattctatctttgtacaacgattcattacaatatcctgtctattcgcttgacgaagaatagtctcagcctcctcattctcaagaccaatttgactccaaaaaacttttgcatccgtctcaagaaaatcataagcaacatctggtaaaaactcacttcgtctaaatatatcaacaatatcaatcgaaaatgggatatctttaagataagcataaacatgctctcctagaagctcctgaccttctagtttgggatttactggtatgatacgataaccagcagcttgtagaaaatgagcaacctgataagatgctgcctccttacgatgagataaaccaacaattgcaatcgtctttgctgattttaaataagattctataacctcagcactaggattttgaaatgaataagacataagactctcctcgtcgttcgaataaattaaaaataaaaatccctaaacgggactgtgaagattagttagctaagctctgcaacgatagctttaatttgttcttttgtatgtacacctgcaacttgcttaacaacctcaccatcttttttgaagagtaaagttggaatagacatgattccaaacttctgagctgtttctgggttctcatcaacatcaattttaacaatcttaagttcatcctctgaaatctcttcagaaagttgctcaagaattggtgcttgcatcaagcaaggcccacaccaagttgcccaaaaatcaatcaaaacgagtccttcagctgtttcttgttcaaatgtagcatctgttactacttgtgtcatatattcatcctcctagacattataaaacttttgtagacctattctatatgattctaaaggccattgcaagaatttgatacatacataaaaaattcttatcaaatattagtcattgcctatcatagacattacttgctcacagcctatcttgggagtataataataaaaaaactataaaaatagaaatgagtaaatatggataaagatgcaatgattacctatctcataggtgaactcaaaaaagaaaatctagaattacatgatttgattatcccagaagaactcgaagaaaagcaaaagcttctcagagcgctctttaatacacgtaaaccaatggcagcatcaacacaattcttgacaatacaagacctttacctacaagttaggaaaggggaacgtggatttgtacaactcagttcactccagcctatcccacaagatgatcgaatctacctctggaagggggatattacaagacttgaagtagacgcaatcgtaaatgcagccaataaaaccttactaggatgtatgaaaccacttcatgattgtgtagataatgctattcatacatatgcaggcgttcagttacgccaagcttgtttcgaactcatcttagaacaaggatatgaagaacctgttggcatggctaaaataaccccagcttacaatcttccttctgcttttgtcattcatacagtaggtccgaaaatagtagaccaaccgacacaaattgatgaggatcttttagcaaaaagctatctctcagtattagcactagccgagaaaaataacattgaatcaatagctattccatgtctatcaactggagatttcaattttccaaaacaaaaagctgccaaaatcgccattcaaacagtcaaaacctttattgatgaatcaagtataataaaaaaagttatatttaacgtatttgatgatgaaaatttagcaatttatcaaaaactgcttgctgaataaaaaaagaagaaaatcaaaatgattttcttctttttttattgcataactgaatgctcttttaaaagattaaaaaatgagggataatctcttttaagattaacaaaaccaccatccttagataagaaactatgttcagaagcagctgtacaaacaagaacaccattctgatttaccatatggtatacaaaagaaagtctagcagatttaacacttttaacaataatctcaatagaaatctcatctgcaaaagtagaagtagctttatagtcacaggaaattgaagtaacaggagagataattccctcctcttcaattttttcataaggccaacctatctctcttagaaaaaaagttctagcctcttccatccatcgtacataattggaatgatgagtaatacccattcgatctgtttcataatactggacctcgtgtttacaaataaacataagaacctccaaaaagattaagaaataaaatctaaaatgtcatcctcagaaagagaagagtcacaaacaaccttagcagttccattttctgaaacaaagagagctgggacggtagcaataccatatcttttacgtaaagcttgaatatcttcaagttcttcactattttcactattaatatagaaaatagtaagatttgaattacgtgcaacattagataatttaggttcaaaaagttgacaatatggacaagaaggacggccaataaataaaataaacttatctgtagaagaaattttatctttagcagtagaaatagaaataggtgtaaactctgatgcaaaattcgacataataatacctctcaaataaaatataatcatatcatatctgaaattaagagttttaacaagtaaataacttaacaaaaaaagctagacctacgtccagcaatgaaacctatactccgccagtaggactcgaacctacgacatcatgattaacagtcatgcgctactaccaactgagctatggcggataaacgctaagcgactaccatatctaacagggggcaacccccaactacatcaggcgtactagggcttaacttctgtgttcggcatgggaacaggtgtatctcctaggctatcgtcacttaactctgagtattctcaactcaaaattgaatatctatactgtatcaagaaaccaaatcgttgtcaatatgtctcagttactttctttggataagtcctcgagctattagtattagtccgctacatgtgtcaccacacttccacttctaacctatcaacctgatcatctctcagggctcttactgatataaaatcatgggaaatctcatcttgaggtgggcttcacacttagatgctttcagcgtttatcccttccctacatagctacccagcgatgctcttggcagaacaactggtacaccagcggtaagtccactctggtcctctcgtactaggagcagatcctctcaaatttcctacgcccgcgacggatagggaccgaactgtctcacgacgttctgaacccagctcgcgtgccgctttaatgggcgaacagcccaacccttgggaccgactacagccccaggatgcgacgagccgacatcgaggtgccaaacctccccgtcgatgtgaactcttgggggagataagcctgttatccccagggtagcttttatccgttgagcgatggcccttccatgcggaaccaccggatcactaagcccgactttcgtccctgctcgagttgtagctctcgcagtcaagctcccttatacctttacactctgcgaatgatttccaaccattctgagggaacctttgggcgcctccgttaccttttaggaggcgaccgccccagtcaaactgcccgtcagacactgtctccgatagggataacctatctgggttagagtagccataacacaagggtagtatcccaacaacgcctcactcgaaactggcgtcccgaggtcataggctcctacctatcctgtacatgtggtacagatactcaatatcaaactgcagtaaagctccatggggtctttccgtcctgtcgcgggtaacctgcatcttcacaggtactaaaatttcaccgagtctctcgttgagacagtgcccaaatcattacgcctttcgtgcgggtcggaacttacccgacaaggaatttcgctaccttaggaccgttatagttacggccgccgtttactggggcttcaattcataccttcgctattgctaagcactcctcttaaccttccagcaccgggcaggcgtcaccccctatacatcatcttacgatttagcagagagctgtgtttttgataaacagttgcttgggcctattcactgcggctgaccataagtcagcgccccttctcccgaagttacggggccattttgccgagttccttaacgagagttctctcgctcacctgaggctactcgcctcgactacctgtgtcggtttgcggtacgggtagagtataattaacgctagaagcttttctcggcagtgtgacatcactaacttcgctactaaacttcgctccccatcacagctcaatgttatagatataagcatttgactcatatcacacctcactgcttggccagacacttccaatcgtctggtttagttagcctactgcgtccctccatcactatatactctagtacaggaatatcaacctgttgtccatcggatacacctttcggtctctccttaggtcccgactaacccagggcggacgagccttcccctggaaaccttagtcttacggtggacaggattctcacctgtctttcgctactcataccggcattctcacttctatgcgctccagcactcctcacggtacaccttcttcgcacatagaacgctctcctaccatacctataaaggtatccacagcttcggtaatatgttttagccccggtacattttcggcgcagggtcactcgactagtgagctattacgcactctttgaatgaatagctgcttctaagctaacatcctagttgtctgtgcaaccccacatccttttccacttaacatatattttgggaccttagctggtggtctgggctgtttccctttcgactacggatcttagcactcgcagtctgactgccgattatatctcgttggcattcggagtttatctgagattggtaatccgggatggacccctcacccaaacagtgctctacctccaagagacttaacatcgacgctagccctaaagctatttcggagagaaccagctatctccaagttcgtttggaatttctccgctacccacaagtcatccaagcacttttcaacgtgccctggttcggtcctccagtgagttttacctcaccttcaacctgctcatgggtaggtcacatggtttcgggtctacgacatgatactaatgcgccctattaagactcggtttccctacggctccgtctcttcaacttaacctcgcatcatatcgtaactcgccggttcattctacaaaaggcacgctctcacccattaacgggctcgaacttgttgtaggcacacggtttcaggttctatttcactcccctcccggggtgcttttcacctttccctcacggtactggttcactatcggtcactagagagtatttagggttgggagatggtcctcccagattccgacgagatttctcgtgtctcgccgtactcaggatactgctaggtataaagactatttcgaatacgaggctattactctctttggcctaccttcccaggtagttcttctataatctttaagtccacgttgcagtcctacaaccccgaagagtaaactcttcggtttgccctcttgccgtttcgctcgccgctactaaggcaatcgcttttgctttctcttcctgcagctacttagatgtttcagttcactgcgtcttcctctacattaccttaacagtaatgagtgacaggcattacctgccgggttcccccattcggacatctctggatcattgctcacttacagctccccaaagcatttcgtcgttagtcacgtccttcatcggcttctagtgccaaggcatccaccgtgcgcccttattaacttaaccttattttggtctttcgacctaactcattaaatattcacagcgtttcggtttattttcttgttactatctatatgtatttaattacatatggaatttgatatagatattcaattttcaatggacaatacttgaatctttcgattcaatggagcctagcgggatcgaaccgctgacctcctgcgtgcaaagcaggcgctctcccagctgagctaaggccccacaagacctctcaaaactaaataagaaactcaagtacattccgtttttccttagaaaggaggtgatccagccgcaccttccgatacggctaccttgttacgacttcaccccaatcatctatcccaccttaggcggctggctccaaaaggttacctcaccgacttcgggtgttacaaactctcgtggtgtgacgggcggtgtgtacaaggcccgggaacgtattcaccgcggcgtgctgatccgcgattactagcgattccgacttcatgtaggcgagttgcagcctacaatccgaactgagattggctttaagagattagcttgccgtcaccgactcgcaactcgttgtaccaaccattgtagcacgtgtgtagcccaggtcataaggggcatgatgatttgacgtcatccccaccttcctccggtttattaccggcagtctcgctagagtgcccaactgaatgatggcaactaacaataggggttgcgctcgttgcgggacttaacccaacatctcacgacacgagctgacgacaaccatgcaccacctgtcaccgatgtaccgaagtaactttctatctctagaaatagcatcgggatgtcaagacctggtaaggttcttcgcgttgcttcgaattaaaccacatgctccaccgcttgtgcgggcccccgtcaattcctttgagtttcaaccttgcggtcgtactccccaggcggagtgcttaatgcgttagctgcggcactgaatcccggaaaggatccaacacctagcactcatcgtttacggcgtggactaccagggtatctaatcctgttcgctccccacgctttcgagcctcagcgtcagttacagaccagagagccgctttcgccaccggtgttcctccatatatctacgcatttcaccgctacacatggaattccactctccccttctgcactcaagtttgacagtttccaaagcgaactatggttgagccacagcctttaacttcagacttatcaaaccgcctgcgctcgctttacgcccaataaatccggacaacgctcgggacctacgtattaccgcggctgctggcacgtagttagccgtccctttctggtaagctaccgtcacagtgtgaactttccactctcacactcgttcttgacttacaacagagctttacgatccgaaaaccttcttcactcacgcggcgttgctcggtcagggttgcccccattgccgaagattccctactgctgcctcccgtaggagtctgggccgtgtctcagtcccagtgtggccgatcaccctctcaggtcggctatgtatcgtcgcctaggtgagccgttacctcacctactagctaatacaacgcaggtccatcttgtagtggagcaattgcccctttcaaataaatgacatgtgtcatccattgttatgcggtattagctatcgtttccaatagttatcccccgctacaaggcaggttacctacgcgttactcacccgttcgcaactcatccaagaagagcaagctcctctcttcagcgttctacttgcatgtattaggcacgccgccagcgttcgtcctgagccaggatcaaactctcattaaaaattttaataattgttcgagcgttaactcattaccgtcgtctgacgatttattcttgtaaattgacaggttataattcttctatcataaccctgcacttggtttcttattcagttctcaaaggtctaaatcgggaagacaggattcgaacctgcgaccccttggtcccaaaccaagtgctctaccaagctgagctacttcccgataaaatgcaccctagaggagtcgaacctctaaccgcctgattcgtagtcaggtactctatccagttgagctaagggtgctcattattttattatgccgaggaccgggatcgaaccggtacgaaagtttcctttcgcaggattttaagtcctgtgcgtctgccagttccgccaccccggctcctcaagcgaacgacgggattcgaacccgcgacccccaccttggcaaggtggtgttctaccactgaactacgttcgcattttatgccggctacatgacttgaacacgcgaccctctgattacaaatcagatgctctaccaactgagctaagccggctaacttttctaatgcgggtgaagggacttgaacccccacgccgttaagcgccagatcctaaatctggtgcgtctgccaattccgccacacccgcatatatgacccgtactgggctcgaaccagtgacccattgattaaaagtcaattgctctaccaactgagctaacgagtctcaaatatttctacttgacggtcccgacgggaatcgaacccgcgatcttcgccgtgacagggcgacgtgataaccgctacaccacgggacctatgggagttaacgggatcgaaccgctgaccctctgcttgtaaggcagatgctctcccagctgagctaaactccctatgcgctaagcgactaccatatctaacagggggcaacccccaactacatcaggcgtactagggcttaacttctgtgttcggcatgggaacaggtgtatctcctaggctatcgtcacttaactctgagtattctcaactcaaaattgaatatctatactgtatcaagaaaccaaatcgttgtcaatatgtctcagttactttctttggataagtcctcgagctattagtattagtccgctacatgtgtcaccacacttccacttctaacctatcaacctgatcatctctcagggctcttactgatataaaatcatgggaaatctcatcttgaggtgggcttcacacttagatgctttcagcgtttatcccttccctacatagctacccagcgatgctcttggcagaacaactggtacaccagcggtaagtccactctggtcctctcgtactaggagcagatcctctcaaatttcctacgcccgcgacggatagggaccgaactgtctcacgacgttctgaacccagctcgcgtgccgctttaatgggcgaacagcccaacccttgggaccgactacagccccaggatgcgacgagccgacatcgaggtgccaaacctccccgtcgatgtgaactcttgggggagataagcctgttatccccagggtagcttttatccgttgagcgatggcccttccatgcggaaccaccggatcactaagcccgactttcgtccctgctcgagttgtagctctcgcagtcaagctcccttatacctttacactctgcgaatgatttccaaccattctgagggaacctttgggcgcctccgttaccttttaggaggcgaccgccccagtcaaactgcccgtcagacactgtctccgatagggataacctatctgggttagagtagccataacacaagggtagtatcccaacaacgcctcactcgaaactggcgtcccgaggtcataggctcctacctatcctgtacatgtggtacagatactcaatatcaaactgcagtaaagctccatggggtctttccgtcctgtcgcgggtaacctgcatcttcacaggtactaaaatttcaccgagtctctcgttgagacagtgcccaaatcattacgcctttcgtgcgggtcggaacttacccgacaaggaatttcgctaccttaggaccgttatagttacggccgccgtttactggggcttcaattcataccttcgctattgctaagcactcctcttaaccttccagcaccgggcaggcgtcaccccctatacatcatcttacgatttagcagagagctgtgtttttgataaacagttgcttgggcctattcactgcggctgaccataagtcagcgccccttctcccgaagttacggggccattttgccgagttccttaacgagagttctctcgctcacctgaggctactcgcctcgactacctgtgtcggtttgcggtacgggtagagtataattaacgctagaagcttttctcggcagtgtgacatcactaacttcgctactaaacttcgctccccatcacagctcaatgttatagatataagcatttgactcatatcacacctcactgcttggccagacacttccaatcgtctggtttagttagcctactgcgtccctccatcactatatactctagtacaggaatatcaacctgttgtccatcggatacacctttcggtctctccttaggtcccgactaacccagggcggacgagccttcccctggaaaccttagtcttacggtggacaggattctcacctgtctttcgctactcataccggcattctcacttctatgcgctccagcactcctcacggtacaccttcttcgcacatagaacgctctcctaccatacctataaaggtatccacagcttcggtaatatgttttagccccggtacattttcggcgcagggtcactcgactagtgagctattacgcactctttgaatgaatagctgcttctaagctaacatcctagttgtctgtgcaaccccacatccttttccacttaacatatattttgggaccttagctggtggtctgggctgtttccctttcgactacggatcttagcactcgcagtctgactgccgattatatctcgttggcattcggagtttatctgagattggtaatccgggatggacccctcacccaaacagtgctctacctccaagagacttaacatcgacgctagccctaaagctatttcggagagaaccagctatctccaagttcgtttggaatttctccgctacccacaagtcatccaagcacttttcaacgtgccctggttcggtcctccagtgagttttacctcaccttcaacctgctcatgggtaggtcacatggtttcgggtctacgacatgatactaatgcgccctattaagactcggtttccctacggctccgtctcttcaacttaacctcgcatcatatcgtaactcgccggttcattctacaaaaggcacgctctcacccattaacgggctcgaacttgttgtaggcacacggtttcaggttctatttcactcccctcccggggtgcttttcacctttccctcacggtactggttcactatcggtcactagagagtatttagggttgggagatggtcctcccagattccgacgagatttctcgtgtctcgccgtactcaggatactgctaggtataaagactatttcgaatacgaggctattactctctttggcctaccttcccaggtagttcttctataatctttaagtccacgttgcagtcctacaaccccgaagagtaaactcttcggtttgccctcttgccgtttcgctcgccgctactaaggcaatcgcttttgctttctcttcctgcagctacttagatgtttcagttcactgcgtcttcctctacattaccttaacagtaatgagtgacaggcattacctgccgggttcccccattcggacatctctggatcattgctcacttacagctccccaaagcatttcgtcgttagtcacgtccttcatcggcttctagtgccaaggcatccaccgtgcgcccttattaacttaaccttattttggtctttcgacctaactcattaaatattcacagcgtttcggtttattttcttgttactatctatatgtatttaattacatatggaatttgatatagatattcaattttcaatggacaatacttgaatctttcgattcaatggagcctagcgggatcgaaccgctgacctcctgcgtgcaaagcaggcgctctcccagctgagctaaggccccacaagacctctcaaaactaaataagaaactcaagtacattccgtttttccttagaaaggaggtgatccagccgcaccttccgatacggctaccttgttacgacttcaccccaatcatctatcccaccttaggcggctggctccaaaaggttacctcaccgacttcgggtgttacaaactctcgtggtgtgacgggcggtgtgtacaaggcccgggaacgtattcaccgcggcgtgctgatccgcgattactagcgattccgacttcatgtaggcgagttgcagcctacaatccgaactgagattggctttaagagattagcttgccgtcaccgactcgcaactcgttgtaccaaccattgtagcacgtgtgtagcccaggtcataaggggcatgatgatttgacgtcatccccaccttcctccggtttattaccggcagtctcgctagagtgcccaactgaatgatggcaactaacaataggggttgcgctcgttgcgggacttaacccaacatctcacgacacgagctgacgacaaccatgcaccacctgtcaccgatgtaccgaagtaactttctatctctagaaatagcatcgggatgtcaagacctggtaaggttcttcgcgttgcttcgaattaaaccacatgctccaccgcttgtgcgggcccccgtcaattcctttgagtttcaaccttgcggtcgtactccccaggcggagtgcttaatgcgttagctgcggcactgaatcccggaaaggatccaacacctagcactcatcgtttacggcgtggactaccagggtatctaatcctgttcgctccccacgctttcgagcctcagcgtcagttacagaccagagagccgctttcgccaccggtgttcctccatatatctacgcatttcaccgctacacatggaattccactctccccttctgcactcaagtttgacagtttccaaagcgaactatggttgagccacagcctttaacttcagacttatcaaaccgcctgcgctcgctttacgcccaataaatccggacaacgctcgggacctacgtattaccgcggctgctggcacgtagttagccgtccctttctggtaagctaccgtcacagtgtgaactttccactctcacactcgttcttgacttacaacagagctttacgatccgaaaaccttcttcactcacgcggcgttgctcggtcagggttgcccccattgccgaagattccctactgctgcctcccgtaggagtctgggccgtgtctcagtcccagtgtggccgatcaccctctcaggtcggctatgtatcgtcgcctaggtgagccgttacctcacctactagctaatacaacgcaggtccatcttgtagtggagcaattgcccctttcaaataaatgacatgtgtcatccattgttatgcggtattagctatcgtttccaatagttatcccccgctacaaggcaggttacctacgcgttactcacccgttcgcaactcatccaagaagagcaagctcctctcttcagcgttctacttgcatgtattaggcacgccgccagcgttcgtcctgagccaggatcaaactctcattaaaaattttaataattgttcgagcgttaactcattaccgtcgtctgacgatttattcttgtaaattgacaggttataattcttctatcataaccctgcacttggtttcttattcagttctcaaaggtctttgtctctcttaagacaacttctatattctagcaaatctagaataccttgtcaacacttttttgaagtttttttacttctcgtgtctgctatctctcgcgaaacagcttatttataatatcatctctggcctgtcttgtcaataacttttttaaagttttggaaccttttcaagtttgtggcaagtcagttaagacaacttttatatcttatcacccaaatcaatacttgtcaataggatttttaaaaaaataaagcagtacaatcatgtactgctaaataaattatttaaaaatttcttttacttgagttgtaaccatacttttctataaagtcttggcggaactcaagtaaattgtcatctataatagcttgtcgtaccttggccattaaatttaccaagaagtagagattatgataactagtcaggcgaattccaaacgtttcatctgctttcaacaaatgtctcacataagcacgtgtgtaattcttacatgtataacaatcacactcaggatctatagggctaaaatcttctgcatacgccgcatttttaaccacgagacgtccttgactcgtcatacaagttccgttacgagcaattcgtgttgggaggacacaatcatacatatcaacaccacgaataacaccgtcaatcaaactatctggtgcccctacccccataagataacgtggtttattctcaggaagtaaaggcacggtaaagtctagaactgcattcatctcttcatgagtttctcctactgcaagacctccaattgaataacctggaaaatccatggaaaccaaatcctgtgcagattgtctacgaagatcttcaaaacctgctccctgtacgattccaaaaaggccttggtcatgtggacgacgatgtgcttttagccctcgttctgcccaacgacttgtacgttcaatagaatttttcacataatcgtatggttggtaaaattgagggcattcgtcaaaactcatcataatatctgaaccgagattgttctgaatcgagatcgctttttcaggagataaaaacatcttacttccattgaggtgatttttaaaagttacaccttcttccgagatgtttcgtttttcggctaatgaatatacttggaaaccaccgctatctgtaagaatcgcttggtcccaattcatgaatttatggagtcctccagctttagcaacgagctcatcaccaggtcttagccataaatgataggtattggccaaaataattcctgaacccatctgttttaattcttcaggagattgcgtttttactgtagcttgggtacctacaggcataaacatcggtgttggaaaagttccatgaggcgtgataatttcccccaggcgtgctcctgtgtgtttttctttctttataagacgatatttaataggaaagtcagtcatttatactccttacattaggaaaaacagtcctaagtattttttagtaagtggtcattatccacaaccgctttagtttatcaaaaattacaagaattgtcagctctatattttcaaacttttggatgaataacatcaaacatcaacactatcatttatagcaaaaaacaaaaagcaacagtctcgagcactgttgctttcaataatgtcttaagctgaaagaactttacgtcctttacgacgacgagctgcaagaacacgacgtccgtttttagttgacatacggtgacggaatccgtgtttacgttgacgacggattttacttggttgataagtacgtttcacgttgaatacctcctgatagattttcgtattcgtttagccggctatttttgatcagttactaaacataccatactattttatagcaatagcttaatcttgtcaagaattacttagatattaatttcattatatcttcgatgcccgatagctagtgataactgtaaactacaatgccgttcctatattatcgcttgctcataaccttcttgctagtttagctattttcttgagtacctcttttcgcttatggtcactcatatactcaacaggtgaaacctgggtaactttgaccggtttaataccacaaggttttaagacttgaaattttaggactttgctataatcttgaactaaaggtagaacaatctttggtgtattgtgggttgtaataatccaagctttcccagtcaatttaccatccaatccacggggtgtattttcataggcaaaaccagcaacaaagatgcgttcaataaatcctttcaagatagctggcattccactccaccaagttggaaaaataaaaatcaactgatctgcccaagttattaaatctcgatagtctttcatagctacatcgtgcgctaaatctcttctcctatgtgttgtatcaaaacgtaaaacaggatcgaacttctctttatacaaatctagaatctttaactcatgtttagacgataaattttctttaacagtctctagtatagaggcattgtagctcttatcgtttggatgggcgtagataattaaggttttcattgtttagctcctttaacatagatgtctaacatagtactaacagtctcttcaatagtgttactattgaaattatcaccaataggactccttaccaaaacggctaatccagtaataaaactccagatatgaactaatatttctgcctcactacccgaaatgttcatttcactttttagcttcaaaaccacactcttaaagtgctcaaaccctggtaaatgggcattaacagagatactgtcccgagtgagctccatataattgaaaggaaacttaataaacaaggcctcaaaactatttgtttctttttgagcaaattccacaaaattacagcccattaatactaattgacctcttacatcaagcgaagagtctaccccttttgtcagatacttcaaaaagatctcagataaatgctccaaaactacctgaagatagacatccttattttcaaagtgcttatagggtgccccatgggtgaccccacatctttgagccaccgttcggatagatagttgatcgacacctcttgttcttatctcctcgactccagtttcgattaacttttccttcaattcagcagtattacgtttcattttgactcctatttccatctaagtagacagcgactaccttttaaataaagtatacgccgtctactttttgttgtcaaaaaaactagccttcaaataagactagtttctgtaagcaataaacgctattgtaatcatacttttgtcacaacaacgtaacgattaggatcgtccccttccgagtgactttcaacaccttcaatttgagaaagtgccttatggataatttttcgttcgctattcgtcattggatccataacgtactctcgacctgtttcttttactttagccgccgttttttctgctagatcaatcaaagtctctgtgcgttgctccaaataatcacgaacattaagaacaacactaaaacgtttagaatgacgatcgtgcaaataattttgcgctaaaagttgcaaagacttgagaaccttgccatgataaccgataacacgaccaggttggtctgtttcaatctgaatgataatattgcgacgattgtgactaacctctagactagcatcaacatccatttcatagataattttttcgaggtaagataaaacatcatctgcagccccttgaatatcttctaaattattttcagaagactcatctgaactaaactcagaggacactaaagaactgaaagccccttcagaagtctccgaagtttgaacttgagtaaccggttctagttggggttcaagcgaatttgccatagattctgtcgcaccctcttctgataactcacgtttaacagatagcggaataattgttgcctttggttgctcctgtttcttatctggcaactcttcatcaagagtctctgtagaaactggttgctttaagtcttcatgtgcaatttccttattatctgaaaccgcaacaagttttgtcactttattgaaagcaatcgtttcgtcttttggacttgcgacagaatcgtctaattgttttatagcatcaggagccactttaacggtgttttgatctgcttcatgagctatcttttcatttattggttcaacactaactcgagctggcttctttccgaaccctagaaaaccttttttctcacgagaaatcaccttaatatgagccttcatacggggtaaattaagatctttcaaacctttttcgatagcttgttcgactgttcgtccagaatagacaaccataataagcctccttatttacgtttatgcgcctttttcttggcacgacgaatcttagctttgcgttctttttcttccgcttccaaacgattacgttcttcaatgattttaaacggattattaaaaaccaaaatctgaacaacttggaaggcgttcgaaactgcccagtaaagtgctacccctgaagaaatctgagttccaaaccagaaaataaagattggaagcatgatattcataacaagaagcattgcactacgatctttagctgccttatttgtcaaccaagttgaaaggaaggtgaaagcagccgccaaaatcggaagaataaagtaaggatctttctgacctaggtcaacccagaggaatgttccttctcgcaactctggcactcgtgtgagcgctccataaagagccatcaaaataggaaattggatcaagagaggaacgaagcttgcgtaaggatttacaccatgctctttataaagatcttgttgtgcataagcaagagcttcacgattctcgcgtccaggatactcactctgcaagcgacgtaactctggctgcaactcttgtagttcacggcttgacttaatttggcgattataaagaggaatcattaccgcacgaattaaaatcgtgaaaataataatacctaatccaatagaaccaccaaatgagagcccttgaatagccttcccaaacattaaaataagacgttcccaaaggcctgtagagtgacttgtaacatcacttcgtccacacgcggacaaaagcaagagagctcctgcacctaaaacagatatattaagttttttcttcactaaaaactcctttttaatacgataaagaactgcttcgcttccattcattaagagtatctcaaaaatcaggagtgattttagtttatcctacaatgtaaagaagcaaaataattttttagtccttatataactttgctatttttaagacatgaacgagattgctataaatgtcttgataacttaagtcttcgacacctttacgagcaataacgacaaaatcttgatgttctaactgagatgacatgtccatcagtgcatgtcgtagacgacgttttacccgattccgagtaaccgcattaccaagacgcttactgactgacaaacctactctaaaatgaggtaaatcacgatccagacagtagacaacaaattttcgattagcaacactgtgtcctgcatcaaataatgctttaaagtctttctctttcttaacgcgataagattttttcaaaatgcgactccaaactcaaaattagtactattatatcataaatagcaaaaaagcccaaaaccttatggttagggccttagagacttatttttttagagctttttgagcttctttgatttgccatttaacctggtcaaaaccagttccaccaagggaatgacgacgttcaacagccgtatgagatttaagtgtctcatagatgtcctcttcaattaggtctgaaacttcttgataacgttcgagaggaacatcctgaaggtaataaccagctttggtaaactcaaggacaagttttccaacaatctcatgtgcttcacggaatggtaggcctttggatgcaagataatcagccaactctgtagcatttgaaaaatctttctctgttgactctgccatatgtttgtcgttaacagtcattgtattgagcatgcctgcgagaatatcaatagcgacagtaatcgtttctaccgtatcaaacataccctctttatcttcttggagatctttattgtaggccaaaggtaatgacttcatcaccgtcaataatccaatcaaattgccatagacacgacctgatttcccacgaattagttctgccatatctgggtttttcttttgaggcataatggaagagcctgttgaaaaagtatcagatagagttacaaacttaaactcgttagaacaccagttaatgatttcttcacaaatacgtgtcatatgcatcatgagaatacttgagtttgacaagaattcgagaataaagtcacgatcggaaacagcatccaaggaattgctatatggttttgcaaagcccattaagtcagatgtcatattacgatcaatcgggaaagttgttcctgctagtgcagcagctccgagtggagagatatccgtatgcttgatattaaattcaaaacgttcggcatcacgtgtaaacatgttgtaataagccatcaagtggtgaccaaaagaaatcggttgtgcatgctgcaagtgggtgtagcctggcataattgtataggtatgtttgtctgctagattgaccaaagtagcacgtaagttatcgagcttctcaataacttccactagtttggcttttagatacaagtgcatatccgtagctacttggtcgttacgtgaacgtgctgtatgaagttttcctgctactggtccaattttagctgttaaaagactctccatattcatatgaatatcttcattggaaacatcaaattctagtttaccagccttatattcctcaagcagctcttccaatccctgtttaatttgtaatgcttcctctttggtaataattcctgtctcaccgagcatcgtaacatgggcaatagaccctttcaaatcaaactctgccatcttttggtcaaatgagattgaagcaccaaattcttctacccatttttcaagactagcttcgaaccgaccgccccatagtttatgattttctgccatagttttattttgaagatttccctacactgagataatcttccatcctttcttaatacttataacaagcaacgacctctttggtcacaataacttaaatgaaaaaagctagatagtatttgtctagcttaatttgtctctctggacacttgttttcctaaaaccagatctctgtcgtagtttatttaggctcgtgacgcctctcagaacgccttaacgataataatataagttataagaaaagagtatcagatgtggctctctgtccacttttatctgataagaagcgtttttcttctaatagcctacttttcttatgtaatctgtcattaattgtcaaatggatggttaacttgtgaattaacctgagttggaagaccccaaagcttgataaatccaatcgcagcatcctgatcaaagctgtccgctgatgtgtaagtagccaagttttcatcatacaatgaattagctgattgacgtgctactacttgagcatgccctttgtaaagcttaactttagcgataccattaacaactttttgtgtttccttaatataagcaatgatagcttgtgtcgctgggctaaaccacaaagcattgtagataaggtttgacaattcattttcaagaattggtttaaagtgagaaacttcacgtaccaaagttaagtcctcaatttctttatgagctgtcaaaagggcgatagctcctggacattcataaatttcacgagatttgatacctacaagacggttctcaacgtggtcgatacgtccgacgccatgcttaccagcaataacattcatttcttggataaggtcagccaatttcatttctttaccgttaagagcaactggtttcccttctttaaaggttacatcgacatattcagcttcatctggcgcagactctggtgaattggtaatcccaaaagcttcttccggagcttgattccaaggattttcaagaacaccacactcgttggcacgtccccaaaggttttgatcgactgagtaaggattatcaaggtctgctggaactggaacaccattagccttagcatactcaatttcttcctcacgagaccacttccattcacgtactggcgctactactttaagacttgggtctagggcagcaatggcaacttcgaaacgaacttggtcattacctttaccagtacaaccgtgagcgatagtcgttgctcctgttttatgagcaatctcaaccaattttttagcaatgattggacgactaagtgctgaaaccaaaggatatttttgttcatagtaagcgtgagcttgaagtgctggaagcacataatcttcagcaaactcatctttaacatcaagcacgtatgactcgacagctccaactgtcaaagctttgtcatggataaactcaagatctttaccttcaccgacatccatacaaacggcgataacatcgtaatcttttttaagccatgtaatagcgactgaggtatcaagacctcccgaataggcaagaataactttctcttttgacataatatttttctcttttcttatattttcttgtggttgctatctctatcaaccttacgagattaattatattgcatatttattcacttgtcaacacttttttgttatttttttatatttatttcatttttatttgtttttatttattattttgaccttagaagtgcttaaatcttaatttttattcaattttatgcaagaggtaatgaaaaataaaaaacacttttgaaactatacaaatagattcaaaagcatctttaactatttatcttctaaaatgccaaaaggcctgtacaaagtacagaccttttgaacaacagcatcatcggtagagaacacaacagcaattttagatagaatgaatgagggaaattattatgtttaagggactaacttaaaccatacattcttcttgctctctaaccttgattacattatagcatgcaatccccaaatgtatatcttcatttcctaaaatgtcgaatttcactcacagaatgtatttttttatcctaatctgcactaatccacttaaaaacaaaaaaacggcttgatttctcaagcctattaatttctataaaaaagatatgtaattggacgagcggccaataaaaaatggggattaggaaaaagttatataaaagtacattatttattttcataaagtgtatgtagatttcaataagattgacgatgtctcatttccgaatcacatatcttgattatataatagcttttttcaatttaattgtctatacgatttcatagaatgtcgttttttcatcctgaactgcatttttttaagatatttttttataaatctctaaattttatcactaaaggacatctattttgtgtttttacagaatttgttcactcataagataatcaatcacctatgaaataaacacatgcttttttagactaaaaagaacattagtcatcgactaatgttcttttacctctgaccattttttaagcagagccttcattttcaaacgtgaaactggacaagaatcaccattttcaaaataaatcatcaactgagtcttatcaatacgagatatgttatccaaattaactaaaaaggagcgatgacaagaaaagagttttttatttaccgaagtaatatctccaagattggcataaaactccaaacgctctgttttagtaatcagcatcaccttatgaggtgtcacagcagtcgcaaaataataaatatctctcatagggacttggatccgagactgagcggtttcaaacacaaaaatctcatcatcatccacatctccaactttttggttcacaaaagtcaatgtttgttttagttgttgtttgaactctgcattagaaactgtcttatcaatgaaatctagtgcagaaaccttgtatttaaaactaatcggtgcaaactctgagtgagttgttacaaaaataataactgcattagcatcttgttgacgaatttctgaggcaacttctagccccttctttcgctcaccatcaatatcgatatctaaaaggaaaacctgatggttgcccttttcattgatactggacaatagtttgtgaggtttagaaaaaacttcaagttttcgtacggaaaacgtgccctctgaaaccaattctctgatgatgtcactaatacgtgtttgctgcattaagtcatcttctaaaatgtatatattcatattagggcctcatttctagtatttgcatcattttatgattctgactacggacagagaaggacgtgttcggataacgttccaaaatatcttgaacagcattaacacctataccaccctcaggatgagaaagctgggtactcatcattgaaagtggcacttgctcttctgcaattgtactttcaataataaaactctggcaatcctcttcatcaaaataggccagactaataaaaccttcactggctttacgagcaccatcaatagcattatccatgaggtgacccaaaacaacagctaaatctaaatcagttagatagttatgaatcactggatctggaatctctgcatgaatattgaggcgatgcatctgagcttcatgatattttgatgaaagtagactatgaatacttggattttggatattatccaaatcagtgacctgagttgaaaaactatgctgatctcgattgacataaagatcaaccaaatcttttttataagaacgaatatcccctgttctttcaatatctctcagattattaagtaggaaattatagttagagcgaacatgcatcaagtctctatacaaaccttctaccctagtattctcacgcttcaaatcatcaagatagttagcctgcttcatcgctaaatcctgctctattttctccttagcaaactggtttacagcaccaagtacaaagaggagtaagtagagatatcccattactaatggcaacctaaatctactctcaagatgtaactctggaaaataagtatcaaatgtcgacactaaaaagataactaaataataaagcaaaagaagcatgttgaccaaacccagacggttctttttttcttgttgggcagcaactttcaagatatctgtaaaatctagacgtaaaataaaatctactattctgaccgtcaacatgacgaaggaaagtggtaccatagaccaccaaatattagtgtttaaagtatcaacagttatgccaagtatcggtggaaagaagaaagtagccaaaaaacgtcttgccaaatcgactagtaccactgggtaaaaacctagaaaaaagcgctctacggaggtgacacttttattcaattggtaactaaatgtcaatgttacaatggctactaagggaggtactatgcctatatagcgtccaatgagttgtccccaaatgcatagagcaacatcaaataacaaataaagtatacgatttttaagattagtgttttgtccaccaatacgtaagtagatatcccaaataatgataaacatcaaaatttgaaataggatgttacccagcatagttatccctctcctttctacgattatagtcctaccgtgacaatttgataggttttaaataattcttttttatttgttaaaccgataccgtttgaccagcaaaactgggcaaaatcacgactaatagccagactaccatcgagtttcggatcagcttcctgattggtattctcaagaataaagctgagattaccatgctcattctgttgaataaggaaaccaatatctgtctccggctccttggcccaaagtttttcagctaaattcatgcaacgttctaaaactctaataagaactgcaatatttaaattgttaggataagcatcaacattgacatccagcctaacggtgatacctttttgttccaaaggaatgatttggtttacaatccaacttcttaataccggataaggaatctcaaacagaggggccaacttatcatttaagtccaaattatcaagtttaagatgattcaaatgctcatgataaacggataaaacctctgataattgatttttagccaatggggtctcaagagctaccaaaagactctcaaaatctttttcaataggttttacttttgtaaaaagatcctcaatatgtttattatagacttccaagttatagacataagtctccacagcttccttactacgttctctgacaaatttatgagagtagcgattcaaggttgttaccattaggagataaactgccatcgcaataaaaattggccctcccacatcactacctgttgataccaaaagagtactacaaataatgtagagtgcaaaggtcagatcaacggctatcaacagacgttcacgaccacgtgaataaatcaattccttgaccttatcaacatctgaactggaaagataattgatatagagaaagaatgggtaaatcatcacataagataacaatttaagcaagaagttttcttgaatctcacccaaggtcatatttgtgaacagattattgaatacataaaatggggtaaaagtcgcaaataaatctgtaaaaagaaccgagaaggctccaaaaaagaggcttgcccagagcgtcaaacgatgttcccgccgttcctttaaggccaaagctaaaaagataacaacttgataatagaagccatcacctttaccaagtgataccactatacctaagagacttaaacaaaatactttccagtaagctaatttgctccttgttagttttttataaataaaccaggtaatatgaaaactaataatctgaataatactattttcaagggataccatggtccaaagctgtaagttcatgataatatttcctgtttatactcaagagacattttcgtcatcttcttcaatgagttcttgacctgcctttttcaaaatatcctgataggtttgttcaataaggtcaaaatccccactatcaatacttgtctgcatactaatgagtatgttttcataatcatgtttaaacgaacgtacactcttataggcagtttcgattttttcattataagcttccagactcctcaagtgctcctcttgttctctgagaattttgctatctcgtacgtctttaccgtaggaaacaaaacgaacaagaatatacatgtgtataaggaaaccaacccaaatataaatttgagggtaacctgggaggtaggtctgactcagaagcaaggagaatatctcctgtttaaagaggataagcagataactgataattaaaataagatcaacttgcaagagcatgctcttatatttatcctgcaagtcctgatagggttcctggaagaagctatctaaaccgaacattttttgcaaacctagaaagaagggaagaacaacactatctacagctaggattcctaaatggtttggaaccaactcgaccggcttattaaagaaaactcggaaaagataaaaactaaagaaacttgtaatcaaagtccaaaagacaggggcaaagaaagcataaaaatacttttcttctcgtagagcctgaggtttttcaagaaaaataaagactaggagataaattgcatctggaatatcaatttgccatagcaccttggctaaccacttaacggcagttactacgattacataaggaatgtaacggtaagtaaaaacatctagataagccattctagctaaaatcacaagatgtgaaacgacaacaaccaaagcaataaggccatcaatcgcaagttgcatatgcttttcccctttctatttcccttatcctattccccacaaatagtatctttgatttatcaattatcctgaaaagagaggacctgtgtaaaatgatggtcacaactacgagtctcaagatttacttttggatagcgattaagtatatctgcgaccttagacaaaccaagccctcggccttcacctttgctagaaaccccttcatcaaaaatccttgacacaggaatacgttcttctctggttgtattgtcaataaccaagataagataaccttgatttttaaagaaagatatagttaaagtaggatcttcagaatccaccgccgactcaatagcattatttaagaagacagaagaaatcacaaccaaatctaaggcctctatctgagttgacgatatgacatctggcaactccaagttaaccttaattcctaagttctctgcctcaagcactttagcagaaaagagactcttgagagatgtgatttctaagttgatcaaacgtgataattcataatttgataacgttaagctattaccagatttctctaaaagttctgcatactcttgtttcaaagcaggtaagtctcgacgttggatactaacctccattgttttaagcccttcgagataatccttcttcacctgagaaatatcattatagagtttttctaaacggtggctatattcttctaaactttcctcgtgtctagccatttcttcagccaactgatccttcactcttctcttagaataaatattaagctgagcaaagagcaaaataaagaggatggagtagacaaccgtaatactgcctgctaaataaataaagaggcctgtgtaaggaaagatgttactagcatagaaaataattaaagataaaataatataagccagagtcaccccaaccaataagcgttgtctaacttggtaagtatggttatttcccataacattgagagcaccaaagtcaataaagaacactttgacaatcagatgaaaaattgggtaaatcaagagataagacaaagcaatgagtactggggtgtctttgacctgtaaataattaatttgaaaaatccatgggaaaaaataaagttgaagcagtttcgaggtgacttcaacaaaaacccacggcaaaaaggtgaaaagaaaagaattcttttcactacttgatattttatttaagaaaagatagcagaacaaaagtgctaagagcgaccctgtaatgcctccaacaaatagagagagcaagagactccctgcgataaaccagcatttactcttccaagttttgagcaaacctgacatatcgtgactaacaattaaaatagccaatagacgtagaaccgtaaataaaacgatcatctctagactcccccccttcctttcaaaaatcaacctactttattgtaacataaatatataatttagcgtcactcctattagaaaaagctaaaaatataaagctattttttcctgattaagaacaatctaacatcagacgattccacatgtcccctacttttcataaacataaaaaagagcttagaaaaactaagctctttaactgactcattacctctttttatgggtacatgccaataacgtagtagaaataccaaccaaatcttctcataatgctcactcctccctaatttttattaccaatctattataaaactaatttaaacttttgaaaatgatgatatggttacgaaatatcatcattatattacaaatgtaggcttagcaattatcatataatcattgacatatcgcttatgtgcattcgaaaacccaacaattgttgggtttgtttttatagtgttgcaagaacttgatcaatatgtttgattgatttttcacgtccgagcaagaaaatagtatctggcaattctggaccgtgcatttctcctgaaacagcaatacggattggcatgaagagatttttccctttgattcctgtttctttttgaacagccttaatttgtgggaaaatgttttcaacaacaaactcatcatcagacatagcttcgagtttggctttaaaggctttaagtactgttggtactgtttcaccagccataacctctttttcagcctctgtcaattctgggaaatcttcaaagaagagatctgtaagagggacaatttcttctgctgctgtcatttgtggtttgtagagttccactaatttttcagctttatctgtcaaacgaccagcttcttccaagaaaggtttgcaaagagcaaagaccttatcgaaatctgcattcttaatgtagtcgttactcatccagtccaatttcttctggtcaaaggccgctggtgacttgcttagacggttttcatcaaaaagtttaatgagttcttcacgagaaaagatttcgtcttcaccgccaggattccaaccaagaagagcaatgaaattaaagactgcttctggaaggtaaccttttttacggtaatcttcgataaattgaagggtgttagtgtcacgtttagacaacttcttaccagtttcagaattgatgataagggtcatgtgtccaaactcaggtgcttcccaaccaagagcttcataaaccatgagttgttttggtgtattggcaatatggtcatctccacggataacgtgtgaaatttgcatatcatggtcatcaacaactaccgcaaagttgtaagttgggtatccatctttcttctggataacccaatcaccaccgatattaccaccttcaaattcgatatctcccttaacgatatcatgccatttataaatccctgactcattaaccgccaaacgaactgtaggtacaatacctgccgcttcacgttctgcgatgtaggcagctttttcttcttcagtcatgccaaggaactcgttaatgtaacgaggagtttcaccagctgcttcttgacgttcacgctctgcagctaactcttcttcagttacgtatgacttataggctttaccttctgccaaaagttgatcaatatatttttggtaaagcggtaaacgttctgattgacgatagttttcgtgtgtttcaggactttcatcccagtcaattcccaaccaacgcaagttatcaagctgtgaatgctcaccatcttcaacgtgacgtttacggtcagtatcttcaatacggataataaatgtaccgccatgatgacgtgcataaaggtagttaaacaatgctgtacgagcattaccaatgtgtagaagccctgttggacttggtgcgtaacgaacgcggatatctttagccaagataaatctcctttttttgtttcattcttcagtctttggatacctattgagcctaaagtcccttccttaggactaaccttaagatgataagtaccagtaggcaactctatcccccaaactttccaaataaaaatctagaagcgagtaccaatctttcttattatatcacaatctaggggtggttcgagaaattttgttaaaaaaacgactacctaaaggtagacgttttcgatagattacttaacgtgtttggcaagatctttttgagctttgtcattagattttgctttttctttaagccaatctttataagctgaatcgtattgtttcttagtcacaatatcatcttgagatttaagatacttgaagtagtatgtagaacctttatcaccggcttgagcataagctcctgagaatggcttaatacgagaaattacagcggctgcaccgttataagtagtcgttgggatataaagtgcactatccgtcaaccatgcctgagcttttgcatatttttcataacgagccgtcaagtctgttgtttccttagaagcatcatcaaccaattggtcatattctttaagacctactttttcaaccgcttgactatttggattgtcataacccatgaaagatttagtattttcaccatttgtagtcttcaagacatcaagataagttgatggatcaaggtagtcaggctcccaagccacacctactgacaagtcccaatcctctgccgctgcatttgaagcagagtaggtaatgttatagaaatcatcagttgacaattgatgaagatcaagtacaacattatcttttccaagagctgattcaatagattgtttaagtgactgcacttggttcacaaagattttatttgactgattgacaggaacatccaaatggattgggaactgaaccccttctgcttgaagagcttctttggctttagcaaattcagccttagctttttctggattataaagaccatcttgactatctgcaagattcacaccagaccactcatcaccataagctggaagttgatccatcaccattgttccgaagtccttaccatctgcttgaacaaagtctggtttaacaaagatattacgaacggcagtgcttccaccttccttaccgttaagttgtgcggcgtaatttgtacggtcaatggcaaaacctaatgcttgacggaaatctttgttaagaagagctgtcttagttgatgtcttttgttgatcattttctttagatgtatggtcataagtttgacgatcgatattaataccgacaccttctacagctgctccaggttgtgtatagaaaatattgtctttgtactgtttttcaactttagaatagtttgagctagttgggtatagacgagctaagttatagactccatcagtgaagttacgttccaaggattcttggtctgtaccatcatcgtaagtcaatttaactgtatcaaaatagacattatccttatcccaatagttttcattcttggtgaactcaatagaagatttcgttgtcaaagatttaagaagatatggaccgttataaagaatagatgttgggtctgttgacttaccaaagtctttacctttagatttcaagaaatcttcattaacaggccaagtaacagagtaggtcaattttgaattccagtaaggttctggttggctaagcgtatattgcaaagtgtaatcatcaactgctttgataccaacatttgagaagtccttgttggcacctgaaaggtaatcattcaagcccttaactgagttttgtagcaaataaatcgcttcagaattagtatcagcagcatgcttaagacctgttacaaagtctttagctgttacattggcatattcttcaccgtctgaagtgtaccatttgacacccttacgaatcttgtaagtatatgtcaaaccatcttgagaaacagaccagttttcagcgacagaaggttttagattcccatattggtcattttcaaacaaaccatcaacaccgttactaacggctgtcgtcatgtttttcttatttgtagaaacatagtctagggttgcaggatcgccaccgtaaacataattataagtcttaccagacgtcttacttgatgacgagcaagccgttaaaacacctacagataacaggcctacggttgctagtaaaaataccttactctttttcattcattgcctccttaattcgcaacgtaaaaagttcaaaatcaataattatgtgtatacgcttaaattataccataaattcgaaaaagcagcactactttctgaatattttttattttctactcaaatttcgtgtctagagtaagaaaaaaacctatccgaagataggttttttactactcttacaatgagttaggatcaactttgataccagcaccttgtgtagtagtgattgaaaggtttgtgatgtaagtacctttcgctgtagctggtttagctttttggattgcatcgttaaatgctttgaagttttcaaccaatttttcagtttcgaatgaaactttaccgatgatagcttgtacgttacctgctttatcagcacggtaagtgattttaccacctttagactcttcaactgctttagcaacgtccatagttactgtaccagttttagggtttggcatcaagttacgtggtccaaggacacgtccaagacgaccaacgattgccatcatatctggtgttgcaacaacaacgtcaaagtcaagccatccaccgttgattttagcaacgagttcgtcttcaccaacgaagtcagcacctgctgctttagcttcttcagctttagcaccacgagcaaatacaagaacgcgttgagttttaccagtaccgtttggcaataccattgctccacggatttgttggtcagctttcttaacgtcgatgttaaggttgtatgatacttcaacagtagcatcgaattttgcgaagttagtttcttgtgcaagagctacagcttcttctacgctgtaagcttttgtgctgtcgattttctcaagagcagcacgcatttgtttgctttttttagccatgttaattatttctccttgtgtaatgtggtcataacgactttcatcttccacgtcactcagcgaagtgagacgacgtctgtggttttcttgttaactgaattagtcagtaacagtgaatcccattgaacgtgcagtaccttcgatcatacgcatagctgattcgatgtttgcagcgttcaagtcaggcattttagtttcagcaatttcttgtacttgtgcacgagttactgaagcaactttaactgagtttggagtacctgaacctttttcaacacctgcagcttttttcaaaagaacagcagctggtggtgttttagtgatgaaatcaaatgatttatcttcatacacagagataacaactgggatgatcataccagcttgatcagctgtacgagcgttaaactctttagtgaatcccatgatgttgattccggcttgaccaagagctggtccaactggtggagctggagtcgctttaccagcaggaatctgaagttttacgatgttttcgacttttttagccattttgtaatttcctcctattgtggttttggcggtaagtaagttttgttacctcccacaagtatgtttttacataccttatctattatacagaaattctttttagatgcaagaatttcttattaagtttaggaaaaaatttacataaaggacttttcgaggtaaaatagacttatgattctatataaattctttgctatagcttttttgattttaacacctatctttgcttttatcatccaccgattctttagtttaaaatacctcgggcttaattttgctgaccttaccttcccactttattttattgaggtggttgctgtgtcagcccgtttcttcacccatagctttctgccttacatcactatcttattatccttggcggctataattatcacaattcagatgctaagaaaaacacaatctttcaagtttaaacgttttcttaagttattctggcgtatcagcttttttatcaccagtcttttctatttagggactgtgattctcatttttatcgtttcttaaaaactagattaactcagcatttatattttatgctgagttttttttatgtcaaaccatgaaaaaagcaggcaatcatgcctgctaaacttttcggtattagggatgaacttgagtcattcgaccagtatctacatcataaaccgcaccggagatgataacatcctcagggataagcggtgactgacgaagaatagccatatcttcacgaacactctcttctacatctgtgaatggaagaaaatcttgatcagaaacatcaacaccaagttctttattgagataggcggtaaactcatcgttcttaaaggtctgagcaccacaatctgtatggtgaagaactacgatttctcgtgtccccatctgttgttgagaaatgaccaaagaacgaatcatatcttccgtcacacgaccacccgcattacgtaaaatatgagcgtcacctagggccaaccccaaagcctgagcaacgtgaaggcgtgaatccatacaagtcacaatagccaccttagtctttggtttcaagggaagatgggctgtcccgtggaggtcaacataggctttgttggcattgagaaagttttcaaaataagacataataactcactttctaatgaagaaaataatttgactatcaaattatttacacactatcttatcatctttttattaacttgtcagctattgagttcgcaacataaaaaaggagaataaatgctaacaagcatccatcctccttcaatttatattatgaacgttttggcaagtatctattaagcaagcctgcaaaggtttgaagattgagactttgaacataaatttcacctgttcctctaaaggtattcacaacaccctctcctgtcccaatagactgccagaaaccattttccaggtgaatattataatcaagtgtctgactccaggcaacgacatgagcattatcaatagtcacttcttgattgtttagctcaatttttttaatagagccataagcatttgccaagagagttccttggccttgggtagtcattacaaagaaaccaccctgaccaccaaaaagagccttaccaacagactgaagctccattgtatagtaagctgtgccatcaagtgctagaaaggcaccgtcgtttagtcggtactgtttttcacctaaataaagtggaatcacttgacctggagaatcaggggccaaggctatatagccgttattggactgcgagacaacctgagtaataaagctactttcgcccgaaaccattgaacgcccaactgcttttacaaagcgacctaaacctgatccactggcatttaatttggtactcagtgtcacattcggtgtgtgatataccatactgccacgctggataaagactgtttcaccttgattaagagataactctactagcgggaattgcatattgctgtctgtaaaaaattgcataataaatacctccctattcttaagaaaagtatagcatcgaacaggtacttttgcaagcgcttccaaacacttgttttgaggcctctttttaagaaaagacttttttgagtacttctcctaccgtcgtgaccccaataacctggataccttctggaatcttcatgccatgaagcgaatttttaggagcataaatcttagtaaaacctaatttagcagcctcattaatacgctgttcaatgcgagttactcggcgaatctctccagtcaacccaatttctcctataaaagcttcttgtggattggttggaagctccttgtaactagaagcaatcgcaacggctacagcaaggtcaatagctggctcgtctaatttgacaccaccagccgatttgagataggcatcttgattttggagaagaaggccacaacgtttctctaaaacagccataatgaggctgacacggttaaagtccagtcccgtcgttgtccgcttggcattaccaaagacggttggtgtcaccaaggcttgaacttcagctaagataggtctgctaccttccattgtcacaacaatggcagaacctgtagcaccgtctaggcgttcctctaagaaaacctggctaggatttagcacctctaccaaaccaccagactgcatctcaaaaatcccaatctcattggttgaaccaaaacggtttttgactgctcgtaaaatacggaaggtatgatgacgttccccctcaaaatagagcacagtatccaccatgtgttccaacatacgtggtccagccagctgtccctccttggtcacatgcccaacaataaatgtggcaatgttattggttttggcaatctgcatgagttcagcagtgacttcacgaacctgagatacagaaccttgaacgccagaaatctctggactcataatggtctgaatagagtcgataatgaggaaatcgggttttatggcctctacttgactgcgaacggcttgcatattggtctcagcatacagataaaattcgttatcaatatcgcctaaacgttcactccgcaatttgatttgctcggcagattcttctccagatacatagaggactgttcccttgttagccagttgcgttgacacctgtaagagaagggttgatttccctatccctggatctcctccaataagaaccagactgcccggaaccacaccgccacctaaaacacggttaaactcgtccatatcagtctttatgcgggcataattgattgaggatacttcttttaatttagttggtttagacttttcacccgtcaaactgacacgggcattttttacctcctgcacctcaacctcttcttcaaaagaggaccaagaagaacagttgggacagcgccctagatatttgggtgaattgtagccacattctcgacaaacaaaagttgattttttctttgctatgataattctccttctacgattactccgacagaatgccacttatgcaatgtttttgtaaatttcttctggttggcaactccgacagcggacaaatcgacagaaacctgataattctccttgacagctgccaaaatggaagccttgacacagccattgccatctacccctataaactctatgcttttagcaccatttccctctaaaaaatcttttaaatctgaattagtaaagcaagaagcccgacgcttctcaaagatacgagaagatacaagcagcaagccggtcgcaaatttcttctttctatcttttctctcccagaaaaaacgattgagaatatagataacccggtcgctaggatagctagcaattttgtcatttacagctacaatcagttcttcatgatatgcttttcctacagcaacataatctgactgcatatcgattactaacaaataatctgccactttgcttcctctactgtccagtcgatccaaagccacctgtacgaacaccatcagcttcgtctccatctacaatcaagaagggcataaagacaccttgaacgatgcgttcgccaacttcaagagtcacgggctgattagtaatatttttcatctgggcgaagatatgaccttcatttcctggatttccatagtaatcgccgtcaataacgccaactgagttaatcaagaccagaccttttttgcgagggtttgatgaacggtcatagagatagagaacctcaccaggttgcatgtaagccttaacacctgttgggacgagaacaatttccccaggagcaatgacaatgttctctgccacctttaagtcataacctgcagcatgggctgtctcacgttttggaagcaattcctgattgttataggttgatacgagttcaaatccacgaatttttgtcattatttttcctttcgatacatctattgactagtatttgtataaactagccatgctagcttcagacttttaaatctatcctattataatctattcgaaataagatgacaaaggtaatagtctaatcactttctcattaaacgaagattgacttttaaccaggaaaacgctaacatagtactagatataatacttttaaggagaattgtcatgaaattcatcggacttgttggtacgaattcaaaacgttcaactaatagacaattattgcaatatattcagaaacattttgcagataaggcagacatcgaacttgttgaaatcaaagaccttcctatctttaacaaacccgctaacaagaaattgccagaaagtgtccttgaaatcgttaaaaaaatcgatgaagctgatggtgttattattggaacacctgagtatgaccactcaattcctgccgttctcatgaacgctttagcttgggtatcatacggcgttttccctcttttgaataagccagttatgattacaggggcatcttacggaacactcggggcttctcgtgcacagttacaacttcgtcaaatcttgaatgctccagaaatcaaagctaatgtgcttccagacgaattcttactttcacattccctacaagcttttgatagcaatggtgatttagtcgaccttgatgtcatcaaaaaactagatgctattttcgatgacttccgtctctacgtcaaaattactggtaaactctcacatgctacagagttgctacataaagaagctgaagacttcgactgggaaagcctataggacaggagaatagaaactatgaaatttgttggactcgttggagcaaattatgaccaatcatataaccgtaaactgctcgaatttatcagaagacattttaaaataaaatttgaacttgaagttttggaaattgatgaagttcctatgtttaaccaagatgaaaaatgggatgacagcttccaacttcgcttacttaataacaaaattacacgcgctgacggtgttatcattgcaacacctgaacataaccacactatctctgcagcacttaagtcagttttagagtggctctcattcgaagtgcacccttttgaaaacaagcctgtaatgattgttggtgcttcttactacgaccaaggaacttcacgtgcccaagtgcatttgcgtaaaatccttgaagcacctggtgtcaatgcctatacacttccaggtaatgaattcttgcttggaaaggctaaagaagcctttgaccttgaggggaacattactaacgaaggtactattaactttcttgaacaatgcttagataatttcatccaatatgtaggagtggtttctaaattgaaaaaaccaaaaccaattgaacctgaagacttggattgtaacaacccaatcgctacaactgttaccgaagttgatcctgacgatccagagtgggtagaaaaagtagctgaaatcactggtgcggtatctggtgatacctacgtgaaattggaccacggtattttgacggttaatcaaattgacatgttcctcaaggctatgccatttgaattgacctatgccgatgataacaaccagttcctctactacaataacgcccatcaagatcctgacactatgtttgctaaacgtgtaccacctcaatctggtagccgtatgtcaactgttcacggctcacttccaccagctcgtatgaaaaatgtagaatgggttatcggtacacttcgtaatggtaaccaagaatatgttcgtacgattgttccagggtcacctgaaggagttatcaatacgcacaactatcaggctatgtactatgatgatggttcttatgcaggaatcaatgaaatcgtctttaactttaaaccatggcttgactggtatctcgaaacaactggtcaacgccttgtcggaggaagcggtccttttgcaccagctgcagctagtcatggcggtagcgacgccacatctggtgcatcagatgcgggtggtcacggcgatgcatcttcagccgcagatgccacatccggagcatcctcatattaagacttggaaaagttgggacaactgtcctgactttttttcatggtcatcttagatttattttcactcgagcttgcgcatttgcccatgctccatgccacacattttagaggtaaacctatgtctcaatttaaagaaaaagtattcgctgcctgcgctaaaaaagaagctctctttgacgaaagtctggggcgctatgccttgcgctctatgctcgctggagcttatcttactatgtcaactgctgtaggaattattggtgcggatgttatcgctacaggtattccagccctttctcgttttgtcttcgcctttatctttgccatcggactggtcttcgttctcatattcaatggagagttggctacttcaaacatgatgttcctgaccagtggtgcctattatggtaaaatcaaatggagcaaggtgtgtgccatcctcctctactgtaccttctttaattttgtcggtgcccttatcttggcctggttcttcaaccaatccttctctttccaacatttgactgacaagagtttcttagttactgctgtctcaaccaagcttggaaaaacagattggatgaactttacagaaggtattacagctaatatgttcgttaatattgccatcttgggctacatgctcctcaaagaagaatctgctaaaattttcattgcgctatcagctatctttatgtttgtatttttgattaatgaacacttgattgctaactttgcttctttcatgttgctcggtttcaacggtgtgcgtgatgctgtggataatttcactttggcaaatattctacgtcagtgggtagtcgttttcttcggtaactggattggcggaggtattttcattggtttggcatactcttggctcaataaaactaaaacacctcacattgattaggagaccacatgcgtcaaaagacattcatcaaacaaaccagcctagctattctactgtattttatttgcctagcccttgcagttgctattgatttaatctttttcaaagtcaaaaatatgtatcatacacctgccttagcggctatctttgcaggctgggtctacttggggcttatcagaaagacaaaacaatttggagcgattacctgtctgggtatctttatgtccctcttcttctttgcttctgggcactttgttctagcctttcttcctagctttctggctggccttgtcgctgactttctagctaagaaagggaactatgagaatagtaaacttaatttactttcctatatgatcttttccctagggaacttagcacccattatcaccatgtggcttgcgcccaaagcttatatcgcacagctcctagccaaagggaaaactcaagattatgtcaatcaagttatggttccctttacagccagtcatgtcttaatcctgattggaggaacgctcatggctgctctcattgggggctacattgcccaaaattggctgaaaaaataaatagccatcagccctcctaacagagagtacaagacaaacatgcttttcttatgttataatgagaaagaatacagtctttttctactttgttagaaaggacctaaagggagacctaatgatgaaaaaacaaaaaatcgctgtcttgggccctggttcatggggaactgcccttgctcaggtactcaacgacaacggacacgaggttcgtatttggggaaacatccctgaacaaattgatgaaattaacgagaaacacaccaatacccgctacttcaaggatgtggttttagatgaaaacattaaagcctacaaagagctatctgaagccctagatagtgtcgacgctgttctctttgttgttccaaccaaggttactcgcttagttgctaagcaagttgctgaacttttggaccacgaagttgttgtcatgcatgcttcaaaaggtttggaacctggaacacacgaacgcctttcaacaatccttgaagaagagattcctaaggaacttcgtagtgagattgttgtcgtatctggtccaagccatgctgaagaaactatcgttcgcgatatcactttgattacagcagcatctaaggatcttgaagcggcacgctatgtccaaggtattttcagcaatagctacttccgcctctacaccaattcagatgtgattggtgttgaaacagctggtgctcttaaaaacattatcgcggtaggtgctggtgccctccacggtatgggatatggggacaatgctaaggcagccgttattactcgtggacttgcggaaattactcgtcttggtgtgaaacttggggctgatcctttgacttacagcggtctatctggggttggtgaccttatcgttacaggaacttctatccattcacgtaactggcgtgctggggatgcgctcggtcgtggagaaaagctagaagacattgaacgtaacatgggaatggttatcgaaggtatttcaaccacaaaggttgcctacgaaatcgcccaagaactcggcgtctacatgccaattacaacagcaatctacaaatctatctatgagggtgctgatatcaaggaatctattctcaatatgatgtccaatgaattgcgctctgaaaatgaatgggataaaaaataaaaatctaaggagttctcatgaagaatcaaaaagttagaaaagctatcatccccgctgcaggactcggaacacgctttttaccagctactaaggccttggccaaagaaatgttgccaatcgttgacaaaccaaccatccaatttatcgttgaagaagccctcaaatcaggtatcgaagatatcttggtggttactggtaagtcaaaacgttctatcgaagaccactttgattcaaacttcgagttagaatacaacttggaacaaaaaggtaagacagacctgttgaaattggttaatgataccactgctatcaacctccactttatccgccaaagccacccacgtggtcttggagatgctgttcttcaagccaaagcatttgtcggaaatgaaccattcgttgtcatgcttggtgacgacctcatggatatcactaatgacaaagcagtacctttgactaagcagctcattaacgactatgaggaaacgcacgcatcaaccattgcagttatgcctgtacctcacgaagaagtttcttcttatggtgtcatcgcccctcaaggcaaaggtgaaaatggacgttatagcgttgaaactttcgttgaaaaaccaaatccagaggatgcaccaagtgatcttgctatcatcgggcgttaccttctaacacctgaaattttcggtattttggaaactcaagaaccaggtgctggaaatgaagtccaattgactgatgctatcgataaacttaacaagacacaacgcgtctttgctcgcgaatttactggagaccgttatgatgtcggtgacaaattcggattcatgaaaacgtctatcgattacgcacttaaacatcctcaagttaaagatgacctcaagcaatacctcattgacttgggacacaaacttgaaggcaaagcagctaaaaaagactaatataaaaaccatcgaacatgacattcgatggttttttcatatgacttaaagataggtaaaccctagaagaatcagcaatagtaacatgtaggttaaaagggctgtagaacgccaacctttactaaataagcggctttcaaccttgttggccaaaaagatagccgcaagagcacctccaactaaaccaccgagatggcctgtaatcccaacactaggtgtaaacaggttgaaaattaagttaatgacaatcaaagccaagtaattgcgacctaactgattaagcaaaggactatgactataatagccaagaatcacaacagccgcaaaaagcccaaacaaggatgtcgaagcaccagccgcaataacattaggcgtaaaaagtaaggtaaaggcatttcccataacaccagctaacaaatagagccctagaaaacgtagagtcccaaaaatctgctcagccattttccccataaagtaaagggcaagcatattaaatagaaaatgctcaacacctatatgcacaaaaattggtgttacaagacgccagaggttcagtgggctgtactgaacaaaagcaccgtacatagcccccatcttaaagaggctcaaaggcgaggtcgcttgaaagccatttaagagatattgacagatgaaagtcagcgtcgtaagccccaacaatagataggttgctgggtatttcttccactcatttatttgcatgtgacgacctccttaacaggtatatcatagttgtctggttgaaaatcatgtttctggcaaggataaaccgtactaacggtctccccttcaaaatcagacaaatagcggtcatagtaacctgctccgtaaccaatgcgatagccttcatcattaaaaactactcctggcacatgaatcaaatcaatctctgatttttccacagccaaatcagacgcaggttccatcaagccaaaagaggttgcaacaagattatctggatcataatccacaaaaatcattcgaccttgtttatatgttttaggaatcaacagtcgtttaccatcctttaaagcctgattgattaaaagactggtatcatattcatgaggaaaagacaaataagtcgcaatcacctgggcatctttataagcaggtaaggcaatcaattgctccaaaagatgtttatctatcttagccttagtctcaggttcttgtgaagttaactgagccaagactgtttttctaagttcatttttcataggtttatcatatcaaaaaagctaccaaaagtcagacttggtagattttttagttgtatcaactatggttaggcttctgccttgtgtttaaggaattttccaatttcagccactgcaaaagcgagagcatcttcatttggactcatcttaggatggtgaagtgcatatggcgtgtcaattcccaaccagaacatgacaccaggaaccttactaagcaaataaccgaaatcctctccagtcatagctggtggacaatcaatcaggttgacctctgggctagcatcaaagaagctcattaactctttagccaaggctggattattttccacaggaagataaccaccttgtttcaacatgatatccacttccataccaaagctagctgctacaccctctgcaatctggcgcacgcgcttctggataaggagactcatttcctgagtaagggtacgaatagttccataaacctctgcagtttcagcgataacattgttagtagttcctgcatggaaagaaccaaaggtaactaccccaccctggatagggtcaacattacgactgacaatcgtttgcacctgagtaataaagtaagaagctgctacaagggcatcattggcctcatgtggaaaggccgcatgtccacctttccccttgaaagtaacgaggacttcacaagtcccagcaaaaagggtgcttgtgttagtcgcaatatcacctaccttgaaatctggacggacgtggagaccataaaactcatctggcaaccaatctccaaaggcaccatcttcatatataagcataccaccagcttcattttcttcggctggttggaagaggaagagcatgttatttttaggctgtacttgaagcatctggtccaaaagaccaagtgctgtggtcatgtgcatatcgtgtccacaagcatgcatacgaccttcatgagtagacttgaagtcaagaccggtttcctctacgattgggagaccatcaatatctgtacgccaaccaatagttttttcaggagcatgcccgtgaagatagacaagaattcctgtacgccaagtacgttgctccacaaaatccttaccttcagtcatttcagcaatacgctctaagagataagcctgagttttaaattcttccaaaccaatttcaggaatttggtgaaggtctcgtctgattttaattaaatcaagtgtcatgtttttatcctttttatttgtcttattttatagagaatctagaaatagaggccctacaggcctctactatcaatatgttacaagttacgcaaagcgtcttcaagtgctgttttttgttgtgttttttcatcgatttccttgatgatacgagctggaacaccagctacaaccacattttcaggaacatcttgagtaacgatagctccagcagcaacgactgaaccgttaccaacttgaacaccttcaataacaacagcattagcaccaacaagaacgttgtcaccgatacgaactgggtctgctgaagctggttcaatcacaccagcaaggacagcacccgcaccaatgtggctgtttttaccaacagtagcacgaccaccaaggatagcacccatatcaatcatagtaccagcaccaatttcagcaccgatattgattacagcacccatcataacgacagcattgtcttcgatagttacttggtcacggatgatagcgcctggttcgatacgtgcattaaggtgacgtttatcaagcaatggaacagctgagttacggccatcttgttccacaacatagtccttgttttcagtcaagttagcaagaagtggttcaatatctttccagtctccgaaaagaacgttaccaagtttagtgacagaagctggaacagcagttgccaattccccttcaaaagttactttaacattcgttttcttttcagcattaccgataaaagcgataatttcttgtgcagacattttttgtgcagtcatgagattctccattcacataaagttaggaattattataccaaaaattctgataattgtctttgcttttgccaaatagagtgtatttttatgtaaaatttgtctttagagcctctatgtcagtaatcactcgatctggtttgattggggatttctccaactctcgacgagaataagggaaggtattcagcaagataccatcgatcccaactgcctcagccacagcaatatcagtcgtcaggtcatttcccaccatgacagtctcagatggctttaacccatgatcatccaaaacttgctttaaaaattcaggttgaggcttacagatacccacatccgaagacaggtaaatggcatcaaagtaaggtcttaactccattaaatcaatctcagcattagtaaaggctgcttgagcattagacaagagataaagacgacagccctgctcttttagaaaggtcaaaacctccttggtatgcggataagctaacaactgcttacgagataagacgcgaaataccatggctatcaaatttccccaatcgtccggctgactagagttactagactgaggccgagcatctacataaagctggttgaaaatctgagctaaatcaacttctggataagcaactcctttaatctctattaactccttacgagtctgagccacacgcttagcataagcctttttaagagcatcaccttcataagccgctccataagcctgatatagctggcctaatgtatcccataacacaggatacttctcatcagttaggatatcaaccaaggtaccataaaaatcaaaaatgtagttcttataggctctatttttcatcactttttacccattgctgaaactttcttacttattgctcccatcatacaccttttaggaagaccaaacaagctaactgagatattttcccatcaaaaaaatcccaacgactgttaggattgcttatcatctctaatacggccaatcaagagctctcccgcaacggttaattgcgtcactgaagtcaagtccaaagtatccttattggcatggaaaaaaagaggtgtcatctcggcaaatgtttgaacatgctctaatggcataaaccaagtcttagcaatcgtcacacgctctaaaaggtcacaggactcttgaaaatgttccagaacatcctggttcgaataagcctgcacctccggtaacaattggcgaaactctttaagatgatcctcatgaggaataactttaaaaatcaagccatgatcagacaaaagtcgtccaaattcttgataattagctggtgaaaaaatatctaaaatcacatcaatactgtgttcacgtaaaggcaactgagccaaatctccaacaaaccaagctacatttttctgaggattttgacgagccgcaagaaggatagaatccttagacaaatcaaaggccatgaaatccttgtcaaactcttgagccaactgacggctataatagccctcaccacaagcaacatctagaacgtgcgagtgtccaggaaggtcacgcaagcgctctgaaatcacctctaggataggatcgtaatagcctaccgcaagaatctgactcctcttttcaaaagaagccatatcatagtgcttatctcccttagtctgtctcaaaaaattaacaaagccctgcttggcgatattaaaggtatgcctattctgacaaatcaagctagacaaatccaaatgcattggcgcctgacagataggacaagcaaaaagactctcttgatctttaaaaacactaaatttggccataaatcctcctcgacacaaaaaaagagcacacacctgaaatcgcttagggctgctggattcctcccctgacccgcttcacgcacagatgttgctccgaaaaatattataccataaatcgaagtgattgcaagtagagaacttaagataagactagctagacctatcccctatccgtccctattatttccttcgatcagtctaaacttcgataaagcataagacttaccatggtgacatttatgtcactacttttttatttctcgacaccttataataaatccataacttgaggaaagcaccaaaagctagtgacatggctgactttattgaaaggagaagtcatgtttaacacatctcttaactcgtggtgagagggtatgagatttaaaaactcaccaaaaataaaaaaaggagaatgacaatgattaataaagaaatgaaggcagctgacctagcctcagtaacaggaggcggatggaagactaaccttgccattggagggctctgcctagcttcaggacctattggaactatgatgtgccttggagcctacaatggctacatggactctgcgcgataaaagaaaggacatatgaacaatgactaagaccattaacaatcgtaaaaacatgactactcaagaacttgaagctgtatcaggtggagtggttccttgggccgctatttctgttggcattgctgctgcaaaactgacttatgaccttagctatgctgcaggtaagtctttctataacctcacccactaactaacagaactcagctgacatctcaaagattttgaggatgataattcatgaaacatacaaaaaatcaaacaaatgatactactgctaatcaatcacctaaaacgaataactatttactcgtaaaaatagctttagctggaattatcggtagcctacttttgatactcctaatcaaccttatctttcatgtacgattaggaacaccaattattgatactaatttgaagtccgcttttggtactctaatcctctttatgcctatttttcttttaacaagagaaaaagaaaaaaaatcatagaaagagtgacctaaactgccttcaggaaaacaaaaatactcttcttccattaaaaagtgcaagtccctttggacttgcacttttgtttacatatcttgccttgtttccaatttagccaatcgtttggcttcttttttacgttcacgactctgacggaaaaagtcttgcataatcttagcacactcttcctccatgacaccagtctctacttctacgcgatggttgagacgctcatctcttaggatatcgtaaaggctacccgcaccaccaaacttttgattgcttgctccatagataactttaggaatacgagccaagccaattgccccactacacatgacacagggttcgatggttacaaagagggtacaatctaacaaacgccaattgcccacagtcctattagcctcctgaatagccatgacctccgcatgcatgatagcttgattgagctcctcacgtgcattgtgcccacgacctatgacttcgccatctttaacgatgacacagccaattggaatctctgctttatctagagatttttcggcctccttaagagcttcagacataaaaaagtctttctcttcttgggtaaagtcaagcattagtgtcactcccgttccaagatttgcgagacaatatctcacttagtccttctattatagcataagaaaagaaataccgaagacctccattttaaaggacacaaaaaaagctaagacgaatcatcctagcttcaaacacattagtctggtgagtcttaggaatcacaccaatgtgttcccccaaggctagacgaaaagtcaacgaccgcttaacatcctaattcatatgtcagtcggagtgtcatagtcaattgtctgtgaaatcattatataggcctaaggcctcacaacgataaacaaaaatgcaactgtctcaaacaattgcaaggatagcgttatagttgtgatatttcacactttccttccaaacaaataatgcctactataaaagtaacttttatagctttttccttacccacctatagtttatcatgaaacctctatcatttaatttaaaaatcggtaataaaacaatgatatacattagaaacaactgttaattgtatgcattcttttgaatattttgcttaacatttaaaaggttgatatatcaaccttttagagcttcataaactattttttctagtctatctacactattaaacacctatcatcctaagtcttatctaattttactgtttattagtctaacaagtgtttaatattttatctccaacaattctttaaaacaaggtatggaacaagataatgattttttagagaggttgcttcaaagataggagacctagatagctagtcaaaggataaactagaagggaagttcttcttccaagacgaggtcagccaagtcattatcaggattattttccctaacagcacgctgagcacgactctccagaagttggaaagaggaacaaagcacttcagtaacgtaatgggtttgaccatccttatcgtacttacgggtacgaagctccccatcaagagaaattaaactccccttgctagcataagatactaaggtctcagccaaacgcccccagacaaccactgtaataaagtcagcctcacgctcaccattttgcgtcttatagcgacgattaaccgcaactgtaacacgtgtaaaagacctatcactagcagtttttaccatttcaggagtcgctgtcaaacgtccaattaaaataactttgttatacatttttttacctccacctatctattcgtaagcggaagtaaaaaatagattattttaaatagctttacagatttctttgagagtatccttactaatactccaatctacataagcaaattgtcctaatattcctagtaaataggagactattacttttctagtaatactgctctctcagatattttcataacagcagttgaatgttaaattttctctactcgtttagctagctcaacgtttttgaaccacaatttcccatgaagcaggaccgacttgttcaaagcgcgtcacaggataatcattatctgcagcccagtttggtatactttccgttgcttgcgtacaatcgaaagctatcaacaactcatcacctgtagctaattcagccatttttttcttcgcatcaatcaatgggaatggacataccaatccacccgtttcaagttttatcaaagccatatgatattctcctcttaatttttgttgggttttacaaagataatataggaagccgtccaaacacctaaaatagtcactggtaaagcaatccatcccttactagaaaaaattgctgtagctgttaaaccattaccaatcgtacaaccaccagcccatgaagcaccgattcccataaaaataccccctagtgtgctcttaccgatggttgacaagtctggcaagcgccaacgaaactctcgagaaccttttgcagcaagaaaggaaccaagaaaaatccccaatacaagaaaaacaccccaaccaagctgtttactatcacctgtaataatataactaattagatgtgctgagggagttgtaatccctaaccctccaacacgacctgtcaactgactagcaggccaagcaattaaagcaacaagacctattagaaatcctgcaaaatatttatggtaagttttctcaaaaagatagtgtctcactcccttatattttgatggaagtgtagcaatctgacgtctgggcttacgtaactctcgaatgacaatgaaacttgttatagctactaagaaaacaagaagataccaaaccggaattcctaattgaccagctaaatcatcattaattacccatcgcttagctattaattgattcaaaggaacaagaaatcctgatttcatagccgctgcacttgtcatataaaagaatagtgcaacccaactacctaggagaccttcaccggcacgataccacgttcctgtggcacatcccccagcgagaacaattccaataccaaatagataggaacccacaattgctcctaacacggaaaattcttcataagggtttccaataatacctaattgaatcagggaaagtactcctatactttctactgtgattgcaataagaaaagcgtaaaataatgtattattacgtgcaatatacatatctcggaaaccaccagtcaagcagaaacgagttcgttgcaaaatgaatccaaatatcagaccaatgaggccaccagaaagaatagttgtaagcataagtacctcctaaaataaatattgattacattttaagaaaaatattataacttgcataatctttcttttttatgattagctataaactttccttatgacaaacaaaaaagcggcttacttaccgcttcttgtcttatttaccctttccagtgtttagctggatcaaaagcctcaccgactactgctgaatcatcaagctcaataataccacgtttttgtggggcatttggaagtgccaactcacgtggggcacacatcataccataactatcttcaccacgaagttttcctgggaagataagggcaccactaggcatcatagcaccaggaagggctacgatagttttaagcccaagcgctgcgtttggtgctcctgcaacgatttggaccttcttatcaccgatgttcacttggcagatgttaaggtggtcactgtctggatgtgcaaccatttcatcaatttgtccaaccacaaagactggaccttgtgtgttttccaaacgctcttcaaagccctctttagccaattcctcgttcaaaacagctacatcttggtctgacaagaaaacttgaccgttaccttcaatatcaatgaggcttgacgcttcaaaaatattccaagcaagagtcttgcctgtttcatcagctgtgacacgcgccactttacctttacgttctacgctacgtttgatgtccttagtatcttccaagataaccaacaaaacgtcaccaacttgttccttattgtatgcaaaaatcatgggttctccttcaatagttcttttatagattttaaaatcgactgacatgccaagaatcgtcattactaccatagcgataactaatcttgtcaattttccagtcactctctgttaattttacgataaattgtttatggtaccaaaagtcattcccataagaaaattcgagaaacatcttagccttactcttcataataaacttaactcgacagggctctaacacaaaatcataggtgcctggagaaccaaaagaagctgaaaaacctcttttataacagttatcagtcaagtatttttgagctaaaggagtcaacttctctttaaattcatcaaataactccatttccccaggaatagtttgatgtgtaggcagattattttcctttttgtaggtgtttatttcttggtgttttaggaagatatcactttcaattttggaatgctctactaaaatttggcataattcttcgatgatctcctcatttttttctgtcagatacttttctttagtttctgaaatatcaagagagatattaggaaagtgattgattttcatcttttaaatctccgacaaaaaggcattgacttcttctttggttttacgagctttattgaccaagcgtcccaattcctgacctttctgagtcacgacaaaacttgggataccaaaaatattccaagtttgcgccaaagccatataatcatcacggttaacacgcacaaaggtcatatctggatggagggcttcaatttcaggcataacgggatagataaactggcagtctggacaccaatcggcagtgaaaaagaaaaccaccttttgatcactttcaacatagcttgccaattcttcaagattcttaggaataatcatgcctgctcctcctcataggtcaagatatcctctgcataaacaaagctataggaacgtccatcctctaagacgatacctcctgtaagtcctggattttccttatcagtgggatttgtataaaggactgcgatagtccccaagtgagataattcttgtctaatatcttggattaatgcagccttcttcatttctgtacgtgactgtctatacttctctgccattgccaagagacctaaagctcctacgcctccagcaaacaaggccaatgttttacgtttcataagaaacattttaccataattttagacgaatggggagaggctacctatctcttgagaatcgtgctaaaatagtagcaagtactactcaaggaggattttatgactaccctatttgacaaaattaaagaagtaaccgagctcagtgctacttcaggctttgaagctcctgtacgcgactaccttcgcaacaacatcactccacttgtagacgaggtccaaacagatggtctcggtggtattttcggtatcaagcatagccaagcagaaaatgcccctaaggtgcttgtggctgcccacatggatgaagttgggtttatgattaaggaaatcaaagcagacggaactttccgtgtcgttgaacttggtggttggaacccacttgttgtcagctcacaacgcttcactctacacactcgtgacggccgtacctatcctgtcatctcaggttcagtgccacctcatttcttacgtgctagcggtggagcttcaagtcttcccagtgtttctgatatcgtctttgatgctggttttgccaaccaagaagaagcaaatgcctacggcgttttcccaggtgatgtcatcattcctgaatcagaaacgattctcacagccaatcaaaagaatgtcatttctaaagcttgggataaccgttatggtgttctcatgattcgtgaactcttggaaaacgttaaggatcaagaactcaacaatactctaatcgctggggccaatgttcaagaagaagttggtttacgtggtgcccatgtctctaccactaaatttgatcctgaagttttctttgcagtggactgttctcctgcaggtgatatctatggtaatcaaggtaaggtaggtgatggtacacttattcgtttcttcgatccaggtcacatcatgttgcccaatatgaaagatttccttttaactactgctgaagaagctggtatcaaataccaatactactgtgctgcgggcggaacagatgctggtgccgctcacttgcagaatgctggtgttccatcaacaactatcggtgtttgtgcccgctacattcactcacaccaaaccctttatgcgatggatgacttcctagaagcacaggccttcttacaagctattgttaagaagttggatcgctcgacagtagatttaattaaaaactactaagacaaggagtaacccatgattataggttttatcggtgtcggaaaaatggcaacagccattatcaacggcctaaatacaagctcacatcgtatcattatttcagggtcttctttggctcgttcacgccagattgcagaggaactagaggttgaagcggctgcttcccatcaggaattgttggataatgctgacctggtcatccttggtatcaaacctcaaatgtttgataaggtactagccgatctcaatttccatcaacctatcataagtatggctgctggagtgaccttagaacgcctcgcttccctcaccagtccagaccttcctcttattcgtatcatgccgaaccttaatgctcaaattctcaaaagcactactggtctttgcactaatgataaggtatccgaggaccttttagcagttgccaaggaaatcacagacagttttggaaccactgttgaattggctgagaaggattttgatacctttactgccttagcaggttctagccctgcctacatcgccctctttatcgaggctctagccaaggctggtgtcaaaaacggcctaagtaagcaggtcgctctgaccattgccacacagactgttctagctaccgctgaaaatctcagtcttggtagcgacagtccacatgatcttattgacaaggtatgtagccctggtgggactactatcgccggtctcatggaccttgagcgtacaggcctcacccatagtgtggtttcaagtattgatacaaccattgctaaagccaaaaaactataagaaaaaagctcggaagattccgagctttatttgatatatggcgctaaaaattgtaagagtaacaacattgaaaccgcaatactattgttaatgatatgggccatgatacagtactctaacttttgaaacttacgatatgctatcccaagggcaagccccatacctgcatatacaatccaaacaccgatactattcggcatatgaacaaggccaaaaagtaaactactaacaatcaagccaacaatagaatctggattaaagacgcgtcccatgaggagccctcgaaaaaccagctcttccacaatcggtgccataattactgtaaacgttatgagaaggaagggattcatatgggcattttctatggctgcctgattggtgctattactaacaccttccatcatcatgactatagaaccaatcctagtaacgatataaatacctaggtaggtcaagccaatcataccccaggccttcagggaagaaagggccttaaagccttcgaaaagcccaagacgttttcctaagaaaagagctcctgcgctcataagaagcaagacaaaaattaagagacagaccagccttatatctttgacacctaaatagatggttggaacttgatcaataattagtattaggaaagctagtaaaaaataaagaaagcgtttgagaattgaccctttgttcatgagaatctacctcttttcatcatttatttgtatctttattataatacaataaaacttatttgacaagacaaaaaagagaacgagaggtgaatttttcaagataatataggctcttatcctattttagataggatgagacgaataagagcaaatcccaatactaagccatagagcaagactgataagactgtaacatatggcaactgaatattgacaaaggcatatagggcaatcaaagcaaagataagcaaaaactctaaaatcagagttgcaactgctgtcgccattaaaatctgtttatttcgctcatcataggcagcaatatacatctggtgaagacgtttaggatgagtaagcgtcgcaaaataatagattgacaaaacataaaccccaatggtaagtcctaaaactaagcctagagcataatcactaagactgttagagcgaataacaaacaaacccaaaacacccaagaaaaaaagagaacatgctactcgtgtaatgtatttcttaaactcgacctctgtttttctctttcctaataacatttttattaacatatcttaacactccctttattatcctttataagagcaatataacttttttcactgataactttaaacacttattcaccttaaacgaaaagactgagtagtacacttatgctattgtttaagatatgaacacccatactgtactcgatacgcttagtcttataatatgttatcgcaagaccagctgacataataccatagatgacaattgtctgaagcgtaaatgctgagtgaccagccataaagagaagactggaaataacaagacccgtcttaaagtattttccaaagagcaccttggctaagagtcccctaaaaatgatttcttccataataggaacgataaaacctactactgcaaacttaagataggttggtacgtgaataaatatcttatttaaagcatcttgattttccatagtcgcattgtgtgttaactgaccaacaaaataccctagaaaatcacctaggaaaaagatgacgagattaagagaagcaatcgcaacgaggcgtctccaattaatctctttaagcgataagagtttaaatctataagcaatcacgataaaaatagccaaactccctaatgcccaaacaccgtaacctatttgctccacaagtgaaaacttaccatcctgagtaagtagtgggaaagcacctaatagtgttaaatctaagattagtagagtgagcgctaaaaaaataacaccaattttcttcattacttgtttaaacatatcttttctccttaatcttcctcaaaaataaagacttcttcaatagtctttctaaaatacctagcaattttaaaagctagttccaacgacgcattatagcgacctttttcgagtgaaatgatggtctgcctcgtgactcccatctcatctgctaactctgcctgactaatcttattagccttgcgaagttcctgaatttttgtttccatgtggtacctcaactttatcgtttattctcaaatagttaaactccttacttttcttcgttaagtttactttacatttatagtatagtttactttacatattttgtaaagtcttttttacattttttgtaaagttttctttacttattgaattacacataaatagaaatagtcgaatgattctgtcagagcattcaaaaaagctggccaatcactcagccaacttttctggtcttatcaaatttttgataacttatttagttttaaggcgctcaacatcacgtgcaatcaccaactcttcatctgttgggataacaaatactttaacagctgactctgctgttgtaatgtcgcctacatgtccaaagacattcttttcaggatccacttcaataccaaaccaagtgagaccatccaagactgaagcacgaacttctgcagagttttcaccaatacctgctgtaaagacgatagcatccgctccgttcaacacaccgaagtattgagcaatgtatttacgcaaacgatccacataaagattataggctaacacacatttttcatcgccagcattcttaccagcaatgatatcacgcatatcacttgatttttcagaaataccaaggagacctgattccttattaaagacgtgacgaatacactctgcatctgccatttcaggctcacggtcgataacaaatggaataatcgcagggtcaagatccccagtacgtgttcccatcataacgccaccaagtggtgtcaaccccattgacgtgtctactgatttaccaccatcaacggcagtaattgaaacaccatttcccacatgggctgtgataatcttagtttcttcaattggcttacctaacaacttagctgcttcttgagaaacatattggtggctagttccgtgtgctccatacttacggacttggtagtctgtatagtaacgatttggcactggataacggtaggctacttccggcatagacgtatggaaggctgtatcaaaaacagcaacactcgtaatatctgggaggagctccttaaaggcccgaatccctgaagctgcacctggattgtgcaaaggtgctaaggctgacaattcttcaatcttagccaaggcatcttcatccaccaagcttgattctttgaaatattctccaccagcaaccacacggtgaccaacacctgtaatttcatcataactcttgataatatcaaaacgaatcaaatcatcaagcaagatttttactgcctgaacatggtcagcaatatctagggtttgcgattctgaacggtcatcaaattttactgttgaaacagaatctttcaagccgatacgttcaatcaaacccttagcaagaacaacttcatctggcatctcatatagttgccatttcaagcttgagcttcctgcattaattgctattgtttttgtcataagccacctctttgtaaaacgctttcaataatatagtcctattctaacatgttttgctagaaaatggaattatctgatttccatttttggaaattctctgtaaaatctttgaggacctctgggttttgcaaatcactaagtggataaacaaaggtctcaggagcattttcagtttgttttttaagcacaaagatagacttcatgttatgtttattgccaaaagctgcttctggaagagtgataacggcaataatatcagcatatcctgatagccatttcttaagcaaatcactttgtgggcttgtcaaaagattagttggtgccaaaagaatagcaataccatctttcttcaggtacttgagtgattgctccatgagaaggtgatgggcataggtgtgttcaccggttgctgcaaccttgaaacgactcgcaatctcatcatttgggtaataaccaacaggtagatcactgataataacatcactctctttgagaatgtgtggtcgaacagcatcttcttggatgtaaactgcacttgaattcaccacatcagcaatgctagctgacaaatcgataaggagatcgtcaacttccattcccatataattaagggttttctgactattatttagaagagtttcagccaagtttcctgtccccgaaccaatctccaaaatatctaattggtcgtccttggtcaaaccttcaagtaggtaaagaatgataaatccaatagcatccggtgtaaattggtgattggcttgtaaggcttccaattgccctagtttaataaacaagaactgaaaagcacgacgccactcctctttacttagatcaagggcacgtaatttctcgttgtttttgatgatgacttcattagctacctcagcccccaaataataggaattttgctcaataagcgcatcgtaagcatgggttccaagatcattttcaatggtttggacattttctaacaacagctcaaaggctgtctcaattgcttcaaaattcatgatttcctccgtccttctatcatatcaaaaaggaaagagaatttctatttctgctcctgcttcttcacataacgataggtcttgatttgacctttactggcaactctaacaatcacttgtttgtccttaacctcataagtcgtagttccctgagagaaactaaaagcacctgcttccttgtccgccaagtccatggtcatctctgccatgagacgactctgactggagatcatttgcgcttggttctgtctagagctagcaaccacccgctccagataaacatgaagaaggagtgtgaaaatgccagccataaacagagcatataggagaacacctcccctaacttgttttttcaaaagcataaacaaaactcctttgtagcccatttttaagagtcacttggatggtgactatctggctcttttggcttatcgtactagattttacattaaaaagcataggttggtaacctcgaccatcagcatttgtttttcgaaaatcagtagcacttgatagtccaaaagctaagtcttgattatcctgcttgacatagagtttgttcccctctacctttaccaactgacaaccttctaattctgcctccatttgttgaacaaataggagccagtcttggttttcttgttgcttgacctgcttaacattgctcaccaatactgtggtcagaccttgataaacttgaattgaaccagcaatcaccaatagagctactagacattccaagagggtaaaagcacgaaccttgctattgagagacatgaataatctcctttcctgattcataaaccgcgataccttgcttgctacgtttaactgtcactgtgatgccatttaaggtcaactgatcctgtttggtctgaactgccatggttgccacactcaagacctcctgttggtggagattcctagccattagcctacgattggtattgatttgttccaaaataagaccactgacaagtactaaaacagccattgctaccaggctttcgataagaatatagcctctaagagaccgtctttttatatttaccgctgcccatattaagctgataggtcaccacctccttatcacttgaaaaacgaatctttgtgaggctagagttgcctcctttggcatcaaacactagcgtctgccccttatccagatgtatatttttaggaatcaccagacttgattttccgttactgattttatccttggccaactgcaattcaacattggacccttccgccgctgccaagcgctgactatctcggtataggtactcaaagcgcagataaaaaagattagtctcaacctgctgaaaaatacctgtgactgagcctgataaactcagagtgagaaaggcaaccactgctaaagtcaccagactctccaacaaggtaaaggctctaattggccactgagcggctttcgccaccatgtttcgcatagtaatcattgtatgaatctgcctgtttttgcgtgatttgaccttctgaaacaagagcggctaagctagctgtcttgttattcttcatttcataaagttctgcttgagaatccacgaccttgaccacagccgcatttccagtctctttaacagaatccttctgcttgctcaagttaggtacaaagagcaaaaggagaatactgataatgagaagcacgaccagcatttcaatcagcgtaaaagcacgtaatttaacggcattcaattttttcaacatcattttcatgacatcattccttccatattttgatacattggtaatagcatagctgcatagatcattacaatcacgacagcaacaataacaaaaatgaggggttgcacaaaggttgttgccttattaagacggttaaagaaagcctgccaaacctcttcagcatagacttctaactcatagcccaacctagcattagcctctccataagcaataattaaggatagttccttagtgaagaaagggtgactagcaattcggtcaggaaaactctgtcctagcatcaaggcttcctctaaatcagcccccagctcacgaaaaagctttgatttttgctctttcattagagcaactaagtctagcaagtcaataccttgccctaagagatttccccattccctagcataataggcggtcgtatatagcctgacagtttggcctataaaagggatttttgccattcggcgataaaagacaagggctggctggcgtttgacccatagatagagaattaagcttaatacaagaagtccgcacaaagtcacaaaaaagagctggggaaaaatctgaaccaactgtacagcccaattctccttaccatctccctctaacagttgaggcagaagataatttttgagccccaacataatcagaatcaggaaacccagaagtagaatagggtaggtcgctacctccatgagtttcttacgaaccttggtcatacgaagcatataggtttcaatcttggttaaactccctagaaggttaccgtgcttatcagcaagggcaatctgagtaacaatattgtccgaaaaacctactgacgcaaacatctggtccaacctgtcgcctcgcattaaactcgctttcataagagacaataacgattctttcaacaagtgacttcgctccaaaaaggctacgatttcagtcaaggtaaaccctgcctttaaaagttgtttgaagagctgaataaccttaaattgctgattaatctttaattttttccccttggatatccccttcagtgagatatccttgtttaaccaagccttccaactgttggttccagctgattgacgaatggctttggaaattttcactggcaaaatcaatcacacctcctcccttaatcagacgcatgtaggcaatcccttgaagggcattatccaactcagacttatctacaccaaggtccagaagacgctcataaacacctgacacactctttgcgtgaatagttgaaagaacagtcactcccgtcagactagctctaataaccgctcgagcagtctccttatctcgaatttctccaataatcaaaacatccgggcggtgacgtaatgatagcttaatcaaattatcataggtcatgtcaattgcttgattcacctgtagttgcaaaacattatcctgtttaatttccacaggatcctcaatcgaaatcacctgctgccccttaaatcgctcctgaaccaactcatgcataagcgtagtctttccagaaccaacgggacctgcaaagagatataatccacgataatccaaagcatccataataggctggattccttgattccagtacactaattctcgacgttcagaatgtagaacacgaataactaaactttctaagccacgataatccccaacggtagacaaacgcagagaaaccctttgaccatcaccacaatcatagtcacaggaacctagttgactcctacgcttctcacccaccatcattcccgccacaaatttaaagtgaccaataagactagccatgaaatcaggccgatatacatcaattaatctcctctcctggccaactcgcatatagagctcgtaattatcctgacgtggaatgacatagatgtcttgagccccacaactatcagcatttttgatcatttccttagcaaattctgttaccataaggacctcctcatagacctattcgtaaaaagtttaagaaaatgaaaaaaagctcgagaatttcgagcttctgcattatttagcgtttaattttacagtgggcatgatttggaaggtcgtttcgcttttcataccccggacggtatttttcctcaggaatttcctgccaatcatccaaaagagcaatcgattggtagacctgcaggtattcgtcacactcctcacaccagtgcttatcctcttgatcccaaaaagcagtcatgacactactacggctgatataacttggaaaggtttcctccatcgcaaaccaaagttttttatagtacttgagggcatcgtaaaaattttcaaattccttagtactgatgatatcctcttgccagccttctaggaaccaccacggttccaaatcccctttcatttcaactacttggtacatttttctttctcacttcatctttggtgttcctattatacaaaattttctggaaaagataaaaaaaatggtcttatattttatatttatcaaaaatagaagagattctagtcatataaatacgaaaagaacccacaattcattatgagttcttttgctttcgttttagtcttcagatgattccacaattgcttcatcaacagcaatgttttcaataacttcaacttcgttaactgaaagtggttcaatgttacggtaacgagccatacctgtaccagcagggatagtcttaccaatgataacattttctttaagaccaaggagatggtctttcttaccacggatagctgcatctgtaaggacacgtgttgtttcttggaaggaagccgctgacaagaatgaatttgtttcaagtgaggctttagtaataccaagaaggactggacgagatgttgcaggaacaccaccagagataacaatatccttgttagcatctgtgaagtcagaaatgtccataagtgtacctggaaggagatctgtatcacctggatccataacacgtactttacgaagcatttgacgaaccattacttcgacgtgtttgtcaccaatttctaccccttggctacggtaaactttttgtacttctgcaagaagataagtttcaactgacaaggtatcacgtacttcaaggagacgtttaggttggattgaaccttctgtcaaggccgcaccacggtgtacttcgtcaccaacttcaactttcatacgagctgtaaatggaacaacgtattcacccattccagtcttaccttgaacgaagactttcttagtacgtgttgcagcatcttcttcgatttcaataacagtacccttaacttcagtgataaccgcttcccctttaggattacgtgcttcaaagatttcctggatacgtggaagaccctgtgtgatatcggtatttgaggctaccccaccggtgtggaaggtacgcatagtaagctgtgtaccaggttccccgatagattgagcggcgatagtaccaactgcttcaccaacttcaaccgcatcacctgttgccaagttgataccgtaacagtgacggcaaacaccgtgacgtgtgttacatgtaaagactgaacggatagttacttcttcaacaccagcattgacaatagcagcagccatgtcttcagtaatcaaagtatctggacctacgattacttcacctgttgtaggattcttaactgatttcttagtgtaacgaccttgaagacgttcttcaagtgtttccgtaacttctttaccgtcagtaatcgcacggatgagaagaccacggtctgttccacagtcgtcttcacggatgataacatcttgggcaacgtcaaccaaacgacgagtaaggtaacctgagtcggctgtcttaagggccgtatcggtcatacctttacgcgcaccgtgagtagagaagaacatttccaaaacgctcaaaccttcacggaagtttgaaaggataggcaattccatgatacgtccgttaggcgcggccatcaaaccacgcataccggcaagttgagagaagttagagatgttaccacgagctcctgagtccatcatcataacgattgggttcttaggatcttgtgtctcaatcagacgtttttcaagtgcttctttcgcttcacgccatgttgttgtaacagcaacataacggtcatcatctgtcatcaaaccacgacggaaggccttgttaatttcttcaacacggtggtgagcagcatcgataatttcttgtttgttatcgataactgggatatcggcgatacccactgtcaaaccagcaagtgttgagtgatagtaaccaaggtctttcaaacggtcaaggaaggctgatgtttcagttgtacgaagacgtttgaaggtttcagcgatgatgttaccaagatttttcttcttgaatggtgcattaatttccaaactatcaataactgtttggatatcttgacctggttcaaggaagtacttatctggtgtactatctgtcaagttctcatttgttgtttcttgaagatatggaatttctgctgggatgattgagttaaagagaattttaccaacagttgtaaccaaaatcttatgaagttggttttctttccaaggtttatcaggcatgctatctactgcgataccgacacggctatgcaagtgaacataaccattacgataagccataactgcctcatcaatatccttgaagaccataccttcaccctcacggccttcttcttccatagtcaagtagtagttaccaagaaccatatcctgagatggcgttacgaccggtttaccgtctttagggttaaggatatgttcagccgcaagaaggagcaaacgtgcttcagcttgagcttcttcagacaatggaacgtggatggccatttggtcaccgtcaaagtcggcattgtaggcctcacataccaatgggtgaagacgaagggccttaccatcaatcaagacaggttcaaaggcctggatacccaaacggtggagggtaggtgcgcggttaagaagtactgggtgttccttgataacatcttcaagaatatcccaaatacgttcatcaccacgttcaaccatacgtttagcggctttcacgttacctgcgtattcacgcgcaacgatttcacgcatcacaaatggtttgaaaagttcgatggccatcaaacgtggcacaccacattggtacattttaagtgttggaccaacggcgataacggaacgtccagagaagtcaacacgtttaccaagcaagttttgacggaaacgaccttgtttacctttaagcatgtggctcaaagatttaagtggacgactacctggtccagtgattggacgaccacgacgtccattatcgataagggcatctaccgcttcttgcaacatacgtttttcgttttgcacgatgatacctggagcattcaattcaagcaaacgagccaaacggttgttacggttaataacacgacgataaagatcgttcaagtctgatgccgcaaaacgtccaccatccaattgaaccattggacgaaggtctggtggcaatactggcaagatgttaagaaccatccattctggtttgttaccagacttgtagaaggcatcaagaacgtccaaacgacgaactgctttaacacgtttttgaccagttgctgtcttcaactcttctttgagttcagcaatttcagcttctaaatccacttgtttcaagaggtcttggatagcttctgcacccattttagcgacaaatgaaccatgtccatactcttgcaatttttcacgatattcacgttctgtcaagagagattttggttcaagtggtgtttcctttggatcgataaccacgtaggctgcgaagtaaataacttcttcaagcgcacgaggactcatgtccaaagtcaatcccatacgagaagggattcccttgaagtaccagatgtgtgatactggtgctttcaactcgatgtgacccatacgttcacgacgaaccttagcacgtgttacttcaacaccacagcggtcacaaacgatacctttataacggatacgtttgtattttccacacgcacattcccagtccttagttggaccaaagatcacttcgtcgaagagaccttcacgttctggtttgagcgtacggtagttgattgtttcaggtttcttaacttcaccataagaccatgaacggaccttagttggtgaagctagtgtgatttgcatacttttaaatcgatttacgtcaaccactagtattacctttcttttgttctattgacaatagcagcgctattctcacctttatcagctaccttagcagagagagtgaactccctctctaaagcttattttattctgttttatctgaagcttcttctttagctttttctaattcagcagcttctttggcttgttgcacacgtgctttttcaagatcatcaacgtgcatgacatcgtcgtcttcaccttcatcaagatcacgcaattcaacttcataatcatcctcatcaaggacacgcatatcaagaccaagtgattgcaattctttaacaagtactcggaatgattctggtacacctggttttggaattggtttacctttagtgatagcttcataggctttcaaacgtccgttaacgtcatctgacttgtaagtcaagatttcttgaaggatatttgacgcaccataagcttcaagggcccaaacctccatctcaccgaaacgttgtccaccaaattgtgctttaccaccaagaggttgttgggtaacaagtgagtaaggacctactgaacgagcgtgaagtttatcatcaaccatgtggtgaagtttgatcatgtacatgacaccaactgacacacggttatcaaatggttcacctgtacgtccatcgtaaaggattgtcttagcatcactatccatacctgcttcacgaacagtatcccaaaggtcttctgagcttgccccatcaaagactggtgttgcgatgtggatacccaagttacgagcagccataccaaggtgaagttccataacctgaccgatgttcatacgtgatggcaccccaagagggttcaacatgatatcaactggtgtaccgtctggaaggtaaggcatgtcttcaacaggaacaatacgagaaacaacccctttgttaccgtgacgaccggccatcttatctccgaccttaatcttacgtttttgagcgatgtaaacacgaacaagcatgttaacacctgattgcaattcatcaccgtttgcacgtgtgaagattttaacatcacgaacgacaccatcaccaccgtgaggtacacggagtgatgtatcacgtacttcacgagatttatcaccaaagatagcgtggagaagacgttcttcagcagaaaggtctttttcacccttaggtgttaccttaccaacaagaatgtcaccttctttaacctcagcaccgatacggataatacccatttcgtcaagatctttgagggcttcttcaccaacgtttggcaattcacgtgtaatttcttcaggcccaagctttgtatcacgtgtttctgattcgaattcttccaagtgaacagaggtatacacgtcatctttcacaagacgctcactcatgataacggcatcctcgaagttgtaaccttcccatgtcatgtaagcgacgatagggttttgaccgagggccatttctccaccttccatagatggaccgtcagcgataaagtcacctttttcaacaatatcgccaaccttaaccaaagtacgttggttataggcagtacctgagtttgaacgacggaatttttgaatagtataaacatcaagagaaccatcttcacgacgaacttcaactttatcagcatcagagtagacaactttaccgtcgtgttgagcgataacagcagctcctgagtcgtgggcagcttgatattccataccagtaccaacataaggtgctttagggtcaatcaaaggcacagcctgacgttgcatgttggcacccatgagggcacggttagagtcatcgttttccaagaaaggaatacatgctgtcgcaacggcaactacctgtttaggagaaacatccacgaaatctacaaggtgtgatgggtactcttggttattaccttgatgacgacccataacgatttcttctgcaaatgttccatcttcgttcaatttagagttagcctgagcaactgtgtactcatcttcttcatcggcagtcaaccaaactacttcgttggttactttaccagttgcacggtcaactttacgatatggtgtttgaatgaaaccatacttgttaaggtgtccgtatgaagacaagttattgatcaaaccgatgttaggtccttcaggtgtttcaattggacacatacgaccgtagtgcgtgtagtgcacgtcacgaacttcatatccggcacggtcacgtgtcaaaccaccaggtcccaaggctgacaaacgacgtttgtgtgacaactctgacaatgggttgtgttggtccatgaactgtgacaactgtgaagaaccgaagaattctttaacagctgcagttacagggcgaatattgatgatttgttgtggtgtcaagacttcgttatcttgaactgacatacgctcacgtacgttacgttccatacgagccaaaccaatacggaattggttggcaagcaattcaccaacggcacggatacgacggttaccaaggtggtcgatatcgtctactttaccgataccttcagcaaggttgaggaagtagctcatttcagctaagatatccgctgttgtcaaagcacgaactttatcatctgggttggcattaccaacaattgtaactacacgatctggatcatttggtgcaacaaccttgaatttttgaagaacaacaggttctgtaaccaccgcataatcatttggtgtgtatacaaatttgttcaaatcaccatccaagtattctgcgattgaatcaatcacatcacgtgtcatttcagtaccagcttcaacaaggatttcacctgtttcaggatctaccaagttttcagcaattgtttgtcccaaaagacgtgtcttgatgttaagttttttattgactttgtaacgaccaacagcagccaagtcataacgacgtggatcaaagaaacgagctacaagcaagctacgtgagctgtcggcagtttttggttcacctggacgaagacgttcataaatttctttaagcgcttcatcagtacgtgaatctgctgggtttttgtggatatctttttcaatggtattacgaaccaactcgctatcaccaaagatatcaacaatttcgtcatcacctgagaatccaagcgcacgcacaagcgttgtgaatggaatcttacgtgtacggtcgatacgagtgtaggcaatgtcttttgaatctgtttcaagctcaagccatgccccacggttagggataactgttgatccataacccactttaccgtttttatcaaccttatcgttaaagtaaacaccaggtgagcgcaccaactgagaaacgataatacgttcaccaccattgatgatgaaagtacccatctcagtcataatagggaaatctccgaagaagacttcctgagttttgatttcaccagtttctttgttaataagacggaaagtcacaaagataggtgctgagtatgatgcatcgtggatacgagcttcttcaagtgtatacttaggctctttcaattcgtaaccaacgaattccaattccatagtgtctgtgaagtttgagataggaagtacatcctcaaaaacctctttaagaccagtatccaagaattctttgaatgaatccgtttggatttcaatcaagtttggtaaatcaagaacttctttgattcttgaaaaactacgacgggtacgatgtttcccgtattgaacgtcatgtcctgccaagtcttctactccttttctacattcgagacctgctttgcaagtcgtgcactttaaatatttgtcttctgccttgttcagttgcttgtcccattaacaagtgattaaacactaacatccacttatctgattaaggataagcaaaaaacttagtttgtgaatttttagaacctttaaatatgagttacaacgcttgaaaatcctaaaaataagcacaaaaatagcagctaaatctgaccgaaaaaacgttgatttaactgctgtatctcttgattggacaatatttcaaccaagtaagacgacaaatagttgtctatattatacctaattttttgcttttttgcaagttttcttggaaattcgtatgtgtcccattttgggagaaattaaaatcaccaagagaacataaaagaaagaccgaaaaagtgtagcgttttcactcatttcagtcttgactttactgttatcttgatgatacaataactttaaactgattaagcaactactacttgtttaatcggtaaggcggaaaggtgttcgcgcaccttccgtctttttctcgtgttttatctataagattattatatcacaattagagtaaattgcaagtgtttttgctaaataaagtttcttaaaaccctataatatcaagggttcttttaattttctattatcataatttcctaatcataggagtcaagccatcacgtgcaactcttgctccaggaatcagatgctcacttttattttctcccctaactagatcaaaatgatctagtttttttatttttttgtattcttttctccaactaccaaaaaaaatatctcgtaaatctcctgaataatacaacaaaattatttgagccatagcaacagcaccttcttctgaccaatacatacctcgttttttcattcgatatgtcattttcctgtgttgtgactccatcacaccaatggttaaataccctagacctctatcctttggtgatgccgtatagctaaagtcattgatgatacgctttttgaaggcctgaaatgactctatcttagcatctgtctctaatagcgactctgctgtatctaagattacctttaggcctatcttgtctcttttcctaattttcttgactgcagcatcagctaaatcgcaggaaataggagtaagatttttcttgatacactcactaacatggtaggggtcccaaaagtgaatatgctcacccttggaacaaaatttcacaaattcacggaatgatgacggggtgtagccttttcctccatctgagtttgtgatgatagttgttcctggtgcaagctcaaaattagttgttatataatctagcagtgtatcttttgcttttttcacttttgagttaataacttcaaatttattttgcagtttctttctacaactactatcagaacccgtgtgtacgacaaaatggcttaattctatggaggattgttccgactttctcacccaaacaccatcaccttcaatataaattatgtcggtcttgattttttcctttcgttctatactttctgataaagcccaagaatcgcactcttctttttgcttaatgaggttgcctgcttcagacactgccctatgaacgacattctttgaaataccaatatcttgtaataaatcaaatacctcaacaactttacggtaaggcataaaagaggccaaaacagtcaccaagtatagaaactcttgcgaaaagcgctgccgtgggataagtcctaactgttcgtctaaagggatcctaatgacatttcccttcttccaacgacttcttgaaaaggtcatagttccaaatgaaaaggttactgttcgttctttttcgttaactcttttgaagccttgggctctcatgcttgctgctattgatttttcataatcagcaaccattttcaaaaaagtttgctgattattttccctcaattttcgcttaaagtctagttcgttaaatgctgtcattatatttccctcccctaactattataaattaaggacaaaaaaataactccctcttaaaatgagggggttattttaggatagaactcagtatagaaagtatagaacatttctatactttagtatataaatactcgttttgcgtatagagatattctatacgctatttatttccaaaattgccaccaatgtttatgtatagaatcattttctatatcttctatacttgtttctataagtaaggtgtctttattatatataatttggtgaagttgatctatctgcttatctttttgtatgatctgttctttcagggtctcacagtattctttatagatgatatcttctacactgttttctttatcttctttattgttttctacactaacttctttatctttttctttacggtctataccctcttctatactttctataccatctttatcagtatagaatttttctttatccagtatagaactgataaccagctgagtgatactgatgcctctttcttttgctatatcactgatctgttgtttttgttcatcggtcagtttgatattgatttgggccatgcctcttcctttcaatttttaacgtgtcactttattataaccctttttatatctacaaaacataaaaataaaaagatttctttttaaatcaaaataaacgagtattgaattgccaattaaaaatctgcaaaactcttacgtacgctttccgttacaggggcgacgcagcctataggaagggggttaccttgatatcccatatttggtccgataccgcctaaaggttctttcattgatccctgtcatagaggcaacatctttgtctgaataacccgataaatatagatcaaatgcgtgcttaagtcgttcatcatcttctgtaaataatgcttttctacctgtgtactttccttgagcttttgctagagcaattccctgggcttgacgttccttaatacgttctctttctgcctgtgcctggtatttgtatatttccaagatcaggttgttaagcagccttcttaaattgtcatcctcaatccctctaagagttggaaggtttaaaacttccagagttgcccccttctcttgaatatagttcattataaacgttagatccttgttattacggcccagtctttccaactcagtcacaacaacaatatcaccttcacgaataaaatctagtaaggctttaagctgcggacgttctttgttcgctccacttgcagcctctttaaatatcttttctgtatctttcagttgttcaagctgtcggtctaaattctgatcgattgtacttactctagcgtaaccaattcttgccattttgtcctccttgttttgcctaaccctattgtccgtctatcaaagcctatcataacaataaaatcataaccacccgtctaacgggtggtttgatcaagggctataagcccataataccagccagcgcctaaagacgctggctttcactttgttcaagccttattgcttttgactcgtcacaagcctctcaaagaggcattcgcattacttaccattatccctgaagggattttcatattcttttacgcttaatttgtccaaagcgatatcatgcttctcttgttcctgaatatatttcttaattgtggcttcattaagtcctaccgtacttacataataaccttctgcccaaaaatgtctgttaccaaatttatattttaaattggcgtgtttatcaaacatcatcaatgcacttttaccttttaaatatcccataaaactagctacactcattcgtggtggaatacttactagcatatgaacatgatctggcattaagtggccttctattatttcaacgcctttatattggcatagtctatgaaaaatctctcccagactactcctatattgattatagattatttttcgtctatacttaggtgtaaatacaatgtggtacttacacatccattttgtatgtgataaactgtgagctttttgcaccatagtcttaactcctttcgttttacaattggcttgaacacctatattgtaactcgtttggagtttttttgttatgacggtataaccttcgatgcgcacccgcatagcgggtggtttatttgtttcgcaccttgggagcgaaacggacttaaagtcacataaaataaaaaagggacaataggctacagcctactgtccttctattttttgttgtgaccccatatatctaacctctacctgataatagtcataaccgtctttataaaagagaggagtgttttctttttctaaaggttctatccgaaattctgataatattgtcaactttcgtctattcctctcaaacatatcatcataagacaacgtcaactcaataaagatacgattatagtcttcatcttttttcaaaaataaaaattttgggaaagtcacaattatatcaactcgatcatctattaagagttcatcacctaaggaaagcggcaaacttgtgccaatatataaatgactttcctcatcccaactaacgtcctctatttttgctgagtctagggaaactgccgttgcctcccctctacccttattttttataatcatatgaaattctgtgttttcattgtattgataatagtacggatccttcaaatctccttgatcaaattcatttattgaataactaggtggaaacagaataggaacttctcgcctcccaataaaatccttacattccgttggaacagaatcaattttcaggataggcttatatttgatctcgtcatcactcattgattgtcgtgtttgataattcaaggtcataacaacacctactaaggttattagtgttccaaaaattgatgcataaaacgacaacaattctcctaaagatagtcctccaagaaaagtatctaaaagtaagggggtaataaacgaaaacacagtcaataaagcaatcaaaacaatcgtttttttcaaatttgtattattcattatgttattataccccattcagttttcaattcctattgaatgatatattttaaagctgttgtttcttctctttgttttgatgctgctgtttctcttgctcaattgttttgtatttggttaagttagctactaccgtatcacgtttttctttaagagcagctctttctaactgtacttcttccaagactttcttcatttgataagggtctgtattcttatcaatatggtttttctcaagtatctcttcagcaacctctacattagccaactgaccttgataagttgataaggctccaataattttattggcttctgagagacggtcatccaaacggtccaattcaaagtcagtttcttctaattgttccaggagtttattttccaggtcttcgtattgttgtgagttagtaacattgttatctgataaaaagttcaattcatcaaccaggcggtccaacttagaaatgtatttatttttcttaagcaagagatccccactcttttgtgaaagttgcttcattacagttccacctgtgatatagcgattttgatttgagtggtcaggattgagaaagtaaaagaaatctttttgtttgacgtaagcggtgaaagttccgttttcgttctgatctagcatccgtgcaggtattttgatttgacctttttggtcaataccaaaatcaactgttacaaagataccttgtgaggtcacttcatcaacttgccacttttcgatatctaacttatactcaaagtcttcctctttttgttcttgctcgtgatggtacattgtagcaacatcttctttggagtagacaacttcattctttgctaaagccttcttaatctcctctaaagaatattttccttttttggaaagtgtacgatcacgggtaaacttttgttgccccttatcatctaaacgatacttgacatactttcctgaaaaatcaacagttacatttagactcttggctttctccttgaaatcttccagggaaagagagtgccgcaataaaaagtcaagacgttcttttatttcaaccttatagacgttttgtcttctccaggcagaatattttgtatagctattatttagttttggttcaataactttagcacctgcaatctctgcatacttatctgaaattgctgctaaagtttgttttgtatttttcttccattggaattttttcagggtaacggtattagtggtatttaaaataatatggttgtgtaggtgtcctttatccaagtgtgtcgcaatgacaaactgatactgtccacccgtcaattccataacagttttacgtcctatctcatgtacctcttctggggttaaattgtcatcaggtgaaaaggattgaataatatggtgtgctaaaaccttcttaggatcgtgtaaatcagattgataggcgtttaacccagaacggccattaaatatatctgcactttctttcatcaaaacaaagtcatcaaatatattttctgcatcagactcatcagtaagattatgaccactgactagacgtttacacaaagttccatcaacaagctccataggaaatgactcttgttctgaattgctagtttctacttttaacgtctttgcatcctgtgtgatatagttgatagacctctttaggttctcagtctttttgatttggagtactttcgtaattggcattttctttcaataaattcccttctttaaactcagtcatgataaccttgttcatttcttttatctcttgacgtaacatctcaaaggcttctggttcaactgttcctgtttcgtgaatgtatctaacaatttggttgacgttacgcccaatagcattaacttcttgacgtagttgcataagttcggaatagtcatagttattaacttccccattaagtgctaactctaatagaaattgttggcgactttttcctgattgttctacacgtttttttaattctttaacctctttagggtttagtcgtagtttgcattctatgtatctttcacgctttaccatttgttacatcctttcatgtttgtctattttttagttagtattctgtgacttaaacctaaataaaacctttcttcattatttgcttattgtaaaaataatccagttttttctactttggttatgccgtatctatggatatagagtgctggacaaaccccatgatataggggtatactttctatctggcaagcatagtatgtggggccccacatactgaaataaaaaagaaatcgctcaaaccaggaccccattttaggccctgtttttgcgatacttttttaatcttggggaagaccccaaacccctgattttgtcgcttgcgctctctttaatgagtgacacttttccaaactgcacactcttattaagtgtgcagttttacaacttgcacactttgacaatctggacatctttttaagatgaccatttaaaatatattttccatttaaaaaccaggttcaaactcaaggatatcttgcttgattttggtatattcatcatcagtcatattttcaagagctgttatagtttgtgtaagattttcggcgaaatcttcacctccatcttcaaacccgttttgtttaaaatcgtctaggtcagcttgtatgattttaactagtgctgctttaggtctacgaacattcatagcattaagcgtcttctgaccttggataaaatcttccatatcaagaagataatccattagcgtcatttcaacagttgttttttgttctttagtaatcgtcatctttttcttcctctcttctttcaatttgtgtcagtgtttttgttctgtcccttcttgttaaggaattcttgcgggacattacatttgaattccttgtgatttttttggggcttcgtcttcttcagcagtttttccgctagtgcgcttttttgcttgtgcgaggctatcataaaaggtgttttctttcattgataccttatcacgactaacaaccttatcttctgataatttttgatatttagtcatagcgtgatcaatacgctcaatcaaactagcactttctttttgaacaatctcaagttgagcagtcaaactttccaaaccaccttcagcaacagcccatgaagctagataaccaaaacttcgctctatacccatatcaatacctaggtgtcttgaaacgacataggcaacagactccgcttgtaattcaccagtcgaatatttaaggtcaggataattttcagcaatcgttttgtcattgtgtaattctgagtgtgccatttcatgaatgagtgttcctataacttgtgcaggttgtcgttttgcctggttagaaataacaatctcatttctttttgtatcataaaagccacctacacctggttctgtttggtcaaaacgaattggaacaccattgctttgtgagatttctttcagactacgatacatattgttatagtcttctttgctgagtggtgttgtagcatcaccactcatgcttggaatatctaatgtttttccttcttgcggtgttacttgagacacatcaaatacagggacacttttaaaaatcaatcgcttaagttcttcacctgtttcaggatcaattttagggttcccatatatatctttgattgttactttaacgggtgcctgaatataaatagccttttgccctttaacagaaccaccacgctttttccattgattgaaagaggcaaccaatgttgcttgaggaagttgtgcttttattagttggatatttctaggagaataattgttaaagtcggccataccgttgaggaattctttgtaattgtccgaattaaaataggacttaattccttctttcaaatgttcgttaagagccttgatatcattattcttaatcatgttggttacagtcatatcacgttgctgcttagtgtagctattatcagaagcgttaagtgggtcagtgccttctgcaacctcttgaccgtcaggcactccatcaccatctgagtcaggagaataagggttagtgcctcttgcaatttctacttcatcacttaaaccgtcaccatctgaatcgagtgtggctagtgattgttctcgcttaattgcttgtgacttagactgtatcggactaaaatcattgttattcataatatctaacatctctttaccaccatccttgatataatgcttgttaatagaaagtgtatcaatttgttctcctttcttacgataaacccccaaaatagccctctcttcagctatttcatccatttgtaaatttaaggttttaccaggcttcatcaaagaagcagggaacgtttcgccatcatctgtcctaaaagcaagtaccaaatcgctatcttctgtacggattgcctttgatacatccaacctattgaacttttcaatatcacttacatcattgaaatagaaagaacttgagtcaattatagctttaaggtcaggcatgatttgaagttttgagaatgcagcccctttattagcaagatagatattatcaaagtgtccttgaccttgaacaatattgtctagggctatgctagaggtgataccttgcttgataagataaatacctgttaagtgcataaaatgctctttttcaaaagtgatttcaatagacttaacctcatccttatctttgacaaaataagttactttacttcctgcaagtgtttcatcataccacttggccacttcttgaagctgttgtgcatagcggtttaatttacgtaattccttgctactaatagggtgatagtgtggtttataaattgactttggttcttcaggtatggtaaaattaagtaaaggttgagactgagtttgagtcggtgacgactcattcaaaggttgcggttcatccgcaacaggtagaggtgctgcctcctggtttccaggtaaatccccgaattcgttctcagccttttttgtatgctcttgagtcttctcaggagcttttttatcgagttggataagtcctttttcagcttttaaatagtcgttccagtcgtttttcttttggccgtctgcaagtgggggaatatcgactttaacagggatattcatatcttgaaatttttcttttataaattttcggcctgcttcgtcattatctacggctagggtaattaaaccatcttctaggcgttgagaaacgttatcgagcatatgtaaacgatcaataagctgtcctagctcccttctattgtcctttaggacttgtgacgggcgattaggcccagttgggtcggaagaggccatatcagccacataacggctcacagtggcctttttaagcccatccatagcaacaagtctgacatctttcagactttccttgtggacttcgtaatagctcataaggtcaataggagcttctgaaaagaccaagcgtttaggttggccaatatcaagtgttaaacccatcattccgtcagagtgagtcatgattttcttcaagcgccctcgttcgtgaatatcgggatgatcttcaattccctgaagcgttgctcctttaagcgccccatctacatcaagagacttaaaaactattacaggctcaatcaaatctcctgtcttatgattggcttgagccaagactcctgctcttaaaaagaggtctatcgtttcatctgatagccctctttcattttttagataagcacgccctaggtcaaagtcttttgactcaaaacgcttaagataatagataaatggttctctttcaggtagaggttcgacttcaatggtttcaaactctcctgtaattaagtagttgacggcttctttaaaatttggacgttttccagtgtttaattcttgaataacttgtaccaggttaatagtgtccccgcctgtttcttgagaccaccatctaaaagtgtttcgttctgggtagagcttcaaagagtcgtgttcttcccaatgatagacgtttccacgttctggaataagtttcattccaagaccttcagcaacagccagaatatctttagccttggcttcgtcacgttgcttgtttgatagtaggcttgatagtgcttgtcctcgttctgctgcatttgacataggttaatttcctttctatccgatttctttccctcgttcaatttgttttgttatggccagtctcactttggccacaaagtcctcttttttcattttcccttcacctatcttggcaagtgctgtttcccatttgccagttgtttcaggattggtataagctatattgagcttatccaaataatgaattagcaatattcctcgttcggttgggaatagttggccactctttttgtcctttgtgatataccctttatcctggacagacttaatcatggcatcccgtgtagcaggtgttcccaagctgtacttaggtagccattttttcaaaaggctgttttcagtgatacgttgaggaggttttgttgcatcttccttcaattgacgttctacggcaatttcttgtccctcttggtacgaaggtaaaacctgttccttactttgactaggaagatagacctgccaacctttagataaagtcacagagccagttgttttaaattcttgcccgttgttatccagggtaatacttgttgacgtgtactcataatctggcgcaaacatcaataatgttctgaaggtcaccatctgataaatcagacgttcttctttttctagctcttccatatttgggatgatctcggtaggaataatagcatagtgttccaccacttttttatcattgacaaaagactttctagggcttctgtttggcgtttctatggttttaccaatggctgcttgatagtcgtcaatatgctctactaggtaatcaaattcattagttgtgataagatttgagtttgtccgtggataggacatatagcctttttgatagagactttggatgatactttttgttctatcagcatcaaatttatagagtttagacatttcagcttgaatatctgtaaggttgtagagtttaggagctgtctttgattttttctcagaagatacctgggtaatcgttgccctatctgacaataattctagggcttttacagcttctgcttcagtttcaaacttggcttcatgagagaaagcgacctggtttgtctggtcaaataatcggagttgccaaaatggttttgaaacaaaattctctatttcctcgttatttttaacaattagcgaaacaataggggtctgtactcgtccgaccgtcatacctttggacttttcaggaattagttcatgatctcgcatcataagagttgtaaatggactcaaattaaaacctactagccagtcagcttctcctcgtgcttccgcttcatggtaatagttgactgtttcttcaggtcttcttaagtttctaaatgccatatctagccctttttgagttagtgagttggcccataaacgataactaacctttttcaaactacctggtatcttgttgagaatataataggcaattgcttctccttcacggtctgggtctgttccaatcataatactgtcaacggtcttaatagcatttttgatagcgttgaagttcttcttggtattttttttgatttcaaattcaaaatgatcggggaacattggaagacggtctactctttcccaattttcaaaattagtccaggggttagaccgttcaaccaagtgtccaaccgcaggacggacaagaacctgggcagatagttgatcggaataaacatcccaaccagtatcagtcttctttggggttcccaaagcattagcatatttttttgcctgatcgggcttttctgctagaagtagtattgttttcatttcactcctcccttaaatgctccgcccttgtttctttttagggctatcttgtagtttagcgctttgtttctcaagagtatctgcaagtttgaccaaatacttatctacctctctttctttagcttttgcaagaaatcgcattctaggttcattaccaatagtattttcttcagctaatgatattactccccgacttgatgcgatatagtgatcgtaaagtcgcttttcaaataattcacctaaacgacctagagcttctgtagtttctaggtcagctttagaagcccttaatccgccagaaggatgattatgactaacaataaagcccttattttggtccttattgacttgatccataataaaagcaaggtcaacggctgtattattataggtacccataaacatatccttaacaccgttaatgttcaattggtcgtcataggtaataactgtgaaaatctcctgcttattcaaagtggccttcatacacaataatgactcaactttttgttcatcataatagacgtttaaaccttcgagttcttttgctacatagtagccaacaaagtcactgagttcggatgcttctgttaactcttcaggtaagtcataaatactatcatttccgataataaattctttataatcagccgtatgttcatagcctttaaagtccaatggttcagatgaattagcttcctgagaatagactcttagcggaagtatcccttcttcacccaagattgatattctatcaatacaaactctagtagtatcttcataaaccgcttcaagtaaatttattttattttttatatcttggcttaaaccttctttagaaaagatattagggtgatctacaatagcgtaaaacctaatacctgctttaaatgcagtatttaggacttctttatctgacatatccgcagaaattttagcgtaaaatgtagggtggagttgagtcgagaaaccaataatataggcttcgttttctcctggaaccacttgctcctgatttacaaaacgaagcaacgcatcagaattaaaaacttttgctgtatcatagtcaagttcttgtttcgcataagttaagaaattctgaaggtcatcaactcgtggatcgtcgttcgtaaccaggtcataaagttcttgggcagtcgtcacgccaaagtaatcatataagctcatttgttattccttccattttttatgtaatagaaaaagccaagtcttaattgacctggcttttatctttagttagactaataaaatttatttaaaagttcttccaactcctggacaagtggattagttgggttgttttgcatatagtcaataagttcatcaaaggtacttacccctaaatcttccatcaggcccttaaaacctcgtggtttttgtttgatatcttcagtcatataatcacctccgtttcttgtattatatcactatcaatcttcatcccatgcaaaaggcagaacatcttcagtttcttctaggtcgtcttctatgactttttcatgatgaattggtaagacggtttcttgaaatgcactctcagaggcaatctcagcattatcttcagaggtcattgcagcttggttaggctctacttcttcgttgcttgcttgagcttcatttttagcaatttcagcttcaagttcagcagtcaaatcaacgactgtttcatattcgatatttgccaaaaactcttcaatatcagacccatagcggacataatcataccagtttttatcagaaggactatccgcaagccagtctttcattgggtgtagatttacacttgtctttttatctcgacaaacattctgcttggcaataaagactaaggcttcatcaataccgatacgtgcaatctcgtcaggtgtcatcaaatcacggccttggcgctggtgagacgtgctacttgagccaccacgtccacggctttcagaatagttctgaatatcaattgtttgtttccctgcacgcattgagaaatacctcatggtgtcttcatcattggtacctagataaagcagagtcgcacagttatttaagattgttttccagtcatccttatacagagcttttaattggttaatcgcttgtaagataatcttaatggacatttcacggcttcgaacagaggccagaacctcattgaagttaggaatacggccaatgttagcaaattcgtcaataataaattgaacatgaagaaggtcctcatagctgtaaccttcacgtcttccctggataattgcatcagcaccgtgggttaattcctcaaacatgattgcaaagaatgttgaagctaagaagttgaaagccttgtttgtttctggaattgcaatgaagacggccgtcttttgagtattccatgtgtcgatatccattgagtcggtcttaatcatatcagtcacggcttggtggtcaaatacactgtattgtgcagacatcacagcaagcactgagtttcttgtttctgcttgaaagtttgcattaaaaaggtcccattgacgacaagcatagttgccagggagtgcttcttccagttcttcaaacattagttctacaggagcaggaacatcttcctctttgcgttgcaagttacgcaagagatccccaatcatagataagttaggttcatatcctcgaacccgactatcaaaatagagataaccaattaaggccctggttaaaagcaagttggcttgtacccagaaattttcaccttgggagtctgattttttagttccttcaatgatagcttcagttactcggtctatatctagttctgagtgcatatacttgaaagggttaaacgtatttgaatttgataaagttaccaggtcaaacactttaatttgatagccatgttcttccaacattgtacccacttcatgcactagcaaccctttagggtcagtaacgacataagaaccgttcatctgcatcaggttaggtttaacataagtaaaggttttaccatcaccaggaagaccacaggcaagaacattcttgtttagttgccactcaaaggggaggcgcttgttgtaaagccccatcttcacattctgagtgaaaagcatgttattttcaggctctttgtcctgaaacccctggagttctcttggagtcgcaaagcgggccgaccctgcttcttctcctgaccttagattttttgtggtactcattttactataaatagcaagagcaataaagaaacctatagccattgcagcaaaccctaaaggcttgaagctaaagagaaaataaggagggttaaaatagtttgttactgtatactcataaggcatgaataagtgttctgccgttacaggtggggacatagagaaaagtgtgtagccacggtttaaagctagggcaaagataagccctaataccgcaaatggccagaatttaggttttttcttttgcataagcccctcctaaactgacttcgtaggcttcttaactttagttcctactgattgttttggcgctgctgccttatgcttagcaatttgttcttgaggttttaagtctttaggagtcttctgaagagatttaatttgttttttgtcgttaataatatcttcttttactctttcaagagctgcttgaaattgtttttgatctttcgatttaaaccagtagttataattgccatttgctagttcttctgcgtgaaattgaataccatattctttcaaataggcttttaacttgtccaggttcatttcattatttgagaattgcttgtaatctaatgtatcgcctctcttctttagggcatctattgattttttctctccaggcattgtctcaatttttgatgaaaccatcttgcgtatatcagcagctctatctgctaatgattttgctagaacacaactgatattgtataggagtctggcactcatccccccttgatttttgaattctctaatgacagcttcttgatctacaaccatttttcttctcctctatcctggataatctgactctttcggcaacttagttacctcatagccatacatagcctttttggctttttttacagtaaatttgaaacgtgatgatttagtcttatcatctttgttataactaacaacgtaagtcatttcataagtctgcttatctttggtttgtgccttttcaagcaggaccgctgttgtagtcaccttgtcaaaaggtttgttagaaacctttgagctaatgaaattattaaggtcactatttgtaagatatgctccaataaagtagcgactaaaaacatctacttcatgttcatctgacatatcattgacagttgaggtttgttttggtgtagactgtgttgttttaattgctcccgatttaagccctaccgcaatagtgtgtgaaacacctgctccatagagggctaagaagagaaccaccaaccaagccacaattttaccaaaacttacaatgttaagtttgcttcctgtataagatgatgaaggaacaacactattactagtaggaagatttgtttttgtgtctgagataggtgacacttgctccacttcatcaatattcactgggttactatcttcttctgatactgattgagaaggaacctttagggattgtttaggtttccgacgactaaacaagcctcctccttcagcgactaaaccaaagtctttcagagattgctgaagatcaccttcagttgggggaatttccacagtcttctcttctaggacttcatttgttttagcgtttaaatgagatattttatagcgacccatagtgtttgtggccaggtgtcttgtttcaatttgctccatttcatagagaaattgagcacgattagtaaactcactaattttgtttgtctgtaggtttgtaacttgaaatgtcattatcaatcaccctccttgtagttcttaagagcagcatctaattcttcaggacttatatcataacgcttgattacttcaagacgtgcttctacttcgagctcttcaatttgcttattataaccatctaagcgcttctgagtttctgcaagttgtttctccgtctttgctttcaattctaaagccctatctaagcgttcttgaattgttttctttttgcgtttaggtttttgttcagtttgttcttcttgtagtttttcttgatagtcgttcattgtttatatttcctttcattgtttacgttcaagcatgatattacagttagcaaaaacaggatcatcagctagtttttctgggtaaatatactcattgtaaaataaaaactcattggcatcattgtttaataaaacagcaccaccttcatctacatctactagcaaacattcaagttgatcacaagtctgttttagcctgttagctgttcgtggttttagcaaggcactgttagaaatgaatacaatcatcctgattactgtgttgttttcaataaattccaagtttggttcattgtagtccagattattgtcctcccacgcctctataatgtaatcataaagacgttctagcactttctgccccttaacaaccatacaatgacttataccctcacctagataactctcaaattggatataagcggtaccataaggaattaaagcctgtactccttccctattctcatccctatacagactcggtaacgttctggatagttcatcaagtctttgtttaaaatctttaaattccatctgattattcctcactgtttaaagagtctgtagaggttggtgaagtagcattgctgcttccgctagtgccagtagaagtagaggcactacttccagagcttgaggcactctctagtgcgccatagctattagtagtgtctgtaacatttgctgagtctgtgacaataaggtagctcatgttatttaccttaaactttttaccatctttagtaaatgttaggcgcaatgtatttttactagcaacattcttctgagcatctttatagtcacccttattttttaggagtgtatttgtgtagttgattgtagcaatggctgtattgttcttttcatcaataaagatatcggctgatttgaaagcctggtcaaccacataacccttataagtttgattaacaggttcgttctccatattgacaacagacgtatatagaccatcagtcataaaaggtttataacgagaacggttctcctctaggtccttcttcgtataataagcaatcaagaatttcctgatatagtcctgagtcaattcagttccttcagcaactttttttgttttaggggctgacactttctgtgttgacttaccaatatgtccaacaccgaacccaataacaaagatcagaattactataatagcaactcctactccttttaaaattttaactttaaatgtatcaatcataataaacctttctttagttgtattttactgtccaggaggcatagcaaaactatagtagcttgcattattgacaaccctccaatggactttatcttggacaaaggtatagttaagctcagaaatcaagaatgaaccatcatcattaacgtgctctacaaacattacatgcccatagatacctaaagtaccgtcaaagccaccagcagttgaacatacggccccaacttgaggggttgaggtagtatgccaaccgttttgagctacaaggttagcaacccaatcttgaccgtttccaagttgtggagctacatcaagtccccaagtttcgtggactcggttccaaacatagaaggtacactgtcctgcagggtaattgtttcctgggtaacctgtgatagtgttgctagacggttgaccccattttagttttccttcgtattcactagggaagtcccaagaagaggccttagtgcctcctggtcctgaacctgttcctgaactcttaggtgtttgatggaaccaggtcaaagcctgtttcgcaatcttttgacgttcgctgattttatcacctggaacaccttcccatttagaaagaaagcgacttgtcagggtatctacgtcatcattgcttgtcaatacgctttttagaatattgatatagtaagggttgtcaccttcaagcatgaaacgaacttgagcttcaagcgtgtaccattttttatcaatcttcttagcatattcaagtaagagtgtgtgacgtgttgccccatctgctgtgtctgtccactgacctagaccgagtccacggtgaagaatgtttggaaaacctccaccataaatagcagggcctcccatattcaaccattcctcattttcccatgagtcggcagaagccccgacaggaggggagagataatctccttcagcacgtttaggctcaatttgagactctacaccaaaacaccctgccattgcagcaattccgttgtcggttgcttcaggaagggacttcttgactaaatcataaagttgttttgctcgtccactcatttcacctgctgtctctgtcgttgttacttgagtatgttggctataggcgacaaaagggaagtaaaagccaggattgacgatttgccatttatcaatcttcttcccttttttatctacgttacgggtgaaggttctggcatcctcattatcttcatcacgtttttcaagatatttggcttcgtcataataccgtttgtcatccttgtcgtctttgtccaaagtctctttgcgtttagcataggcaatttcttgtccattaccttgaacagaccctaattcagtcccctcttcaaccttgtctccagacttaacacgggctcctgatacgttatagaaaataaactccgcatcatctgtatagataatgatattagtcttctgtttcttttcttcgctttccttcttatcctttggaaggttcgttttaaaggtctttagtgtagattttccaacctcaacttttccgtccataggcgcataaagtttttgacctgaagaggccttaatagttgtgttatagctaaacttatcttttgctgtataaccataacgtttttctatcatgactccttcagactgacttttgtcatcagcagcattatacagagggttttgaagttcttgcattccaggatatttccctgactcttttgcgttttcaagaatttcttcatattcttcccgatcagacttactgagttttgtccactccttaccgtttgagtagacatctttcattgtcttcaggttgtttgggtcgtcgttttcctgcttccaaatatcatcaagagcatctgagaaatggtttaggccaaatttccctgcccatttgccaccattaccatcttcccacttggcagatggttcccattctcctccgtaacggtaattcatatatagcagaatttcatcaatatctgtgtagtattcaaccttatcattcgattttttacggtctgtcttagataattgaacccaagagtcatttaaactgaaatctgtttgttgaacaatatttgacgagaatacaccagtgaccatgaccacaagtaacattaaagctagaattacagcaaccacccaaccaactggggtcgcaaagaaagcaatcgctccgttgacagcagcagcagcagccttaatagctagctgagccacttgcaaggctcttctggctcctttgacacttgcctgagcagcacgcctagcattcttagcagtcctttttgcgactcttcccgctgatttcgttgaacgtttggcaaaacgagagcccttaacaacacctctacctgttgctttagatactcttccgatacctctagcaccttttttggcactgcgaagggcattttttgacgttctcgtatgctttacaatttcttctaaatcttcgtcttgacttagacctgatgaaatataagaagtgacagcacttgtacctgtgtgagcaacagctcttgtaatcttcttggtatttgtcgggtttgtctttttaactatcttctttgttttacgagcaatccttaagttttctttactcttcttcttgagtttgagagcttcagctccccctccttcacgatagttcttagcagcttcccgataagcgaccttagcttttttatactctttattcgcacctcgctgtgcaattcggcctctattgttattatgcctttggacagcctgactgatttcttgttttctttgagagtatctactttttgacgattgattattactcaagaaataatcacccctttctatttagatatgaaaaaagaggtgattatctatcacctctatgcacctgcttcagaataagcatctgttgcaattagtttaaataatttcgtagtgcttgggattgggttttcaaaaggaaccactgttccgcctgcaataataagacctgttccctttgctttaggtttcgttacgtatcttaattgactttctgtcaattcatacatagctgccaactcacgagcatcagaccctttttgtttcaaaagtacaacaaattctgagttgtttaacagcttacgtccttcagtacgaacaagcaacgtttccacgttctgagtaattcccgtaggaattgccccatatttacggacacgggcgtacaagttagtgaaaaatagtgcctgattatcagtttgaaattggttttgcatttcatcaaagtaaatacgtgtagtgaattttccttgattattaacaaccatattccaaatatagtcttgaataaccatcagtgcgaaaggcttcaatttcccatcaagttttttcaaattgaagataacaaagcggtcattgatatccacatttgtttcataagagaaaatatcctgagaacctttagcataggtttcagaagcaattgccatatctctagcttcttgttctggttgatccaacataatatcatgccaatctttaagggttggcatacgtcctttatcttggaaacgttcgtaagttaagtgagttacacggtcaataatagacacctgggcatctgtaacttctgtaagtacgttttcaaagaaaccaatcaacaatgaagatttttgagcaattggatctccatcttcagcatccagtttatccatatcaggcaaatctagtaggttaaggtgagtctgagaacctgggtaaatatctatcatctgcgctccaaattctcgtccgatatcactatactcgtcttcagggtctactatgatgactctatcatatatgtttttcaataatgttggaattacttccattgatttaactgttaccgacttaccacttcctgagctcccaagaataacacctgaaggtgtattcaaatcacgttgacgatcaagggtaatcgaattatggcttaattggttttgcccataatagactgcccaggggctcttactttgaaggtcaacgttcgtgaaagggacctgtgtcacaatattagaggttgtcatgtcacgcatatagttttgtttcacttcaaggaacggaataccaatcggtaaagttgaattaagaccattttcttgttggtaagaggctacatcaaattctgcgccatgcttacgtccagcagccttaactcgacttgtaaagtcttctagctcttcttcgctatccgctttaaagaagactgtgaaaatgcctgaataaattttttggtcattatcctgtatttcagacttccaaacttcggcttcttcagcaagttccgcagcaaccccaccagtagcaagttcctgtgaaataccatcacgagcccctgctttttgacttttaaccatatccattttgatagccgcctctgcattattgatttttttcaaggactcacctacatcataaggacgtgctaaaacattgataactaattcaataccaacatctacgagcgacttaatcaaacgatcattaaggaaattcggataatttctgacaaacattacacgtccaaattgattatcaatcttcatcattttaggttggaaccaaattgaaccaggtgcaataaatgatttggtaccaagaccacttcggataaggtcacggtaatcaaggttcaagtatggattacctctaagaatatcagagaagatatttaatcgatctgagccatttaataccttgaaatcaacatctaccgcctggaattgagctgtaaagttgttttcaacgtcattaagcctacggtaggccatttttctatcttcagctattgtagaaactgtaacaaattttttaacctcaaagttattttgttccttatcaaaacgatctttaattattttgttgtattcatcacgataatcattgaaaccatcatttactctatcataagaaatttgctctacagcattgtcaggtaaaggacggttaatgaccgtgagttggtaggtgttatcactgtctaagacatttaaagcatcagcataataatctataatatctgatttttcgtcatcgctagcggtaatgtagttagcatcacccaaggcataggtccgtgaaaactcacgacctgtaatgtgcatgagtccatcttcaaaaagactcgtgtacttaattgtattttgagttgatttttttaatgctttttgtagctgtttcccacgttctagctcctcttgtgtaagaggtggcttaattccattcgtggacatcttttgcttgcgaaaaggcagaattgccataagttacctccttattatttccaaatgctgtgaaatcatcatcagtttgatagcttctttcttgaattgttaagataaatagcattcgttctttaacaatcccgtccaacttaagcccatagacgataaaaggtggtgttcctagaacaaccaccatatacatatataggtcaggaatagaccaaaaaactgttggtaagacaccaatcataacgacagctcctacacctaagaccattataaaaatgcgggccgtcataccgcctacaaccgatctttcatactggtcaatttcttttaggaaaatcgaccctaatttacttttattcaactatatacctccatttagttagcttggagaagtgatcttgccatccgttgtgaacctaagagcaaccaaacaaataaaatgcactttccaatataagaaaaacctgatgcaaatgtttttatccaatctgcattagctaggtcaatatcggtttgcactccgaaggcatgccaaataaccaataaaatgacaatcaaaagtccttggagggcagctgcggtagtctttctcaataaattagtcgcaatgcttcttgtgtcatcagacatccaaaaagcaacgattaaaggtgatacggctctgtagagataaagttcaataaatctcataaatactaggatatttgttagtatcaaggctgtggcaccgcaaagatatgctagtgaatttacaaccgccctaatgacccaatttccttttttaagagctgtaaattcaaaaagatcattcgatacgttagctccaaccatacgtatcaatagactagtaacctgcataatagcaacaacaatttggcttgacatggctactagaaagtatgcaataagatactttaaagcaacttctaacatgagacgataagtcagttctccgccttgttgcttaagatacttgtaccaggacatcatttctactaacaaaaagaaactaacaataatataacctactacaacaaaacttttattaataccaataacagcttggtttgcagcgctattatattgtcttaagcttttcgtcatgttttttataagttcgtccatagtcctcccttcatactttaaggataaaaaaagaagtgtccgaaacacttcatgataaatattaacgtgataagagaaaaacaaaacctatgatacgtacaaaaaagaagaaaatggtcaaaataatattaactataaataaagcaagtgagaaagcaagttttaccaacccccataaaacactgaagataaatgtcagtgcattccaaaggcttctccaggctgattttttgcgatagttaggactatgttttgaagtataatcctgatttccgatagttagaggactagacgactcagaaattacaaaaatatcaccatttttttcggcttcataaacctctgaaatagaaggtctatgaccattgatactttcataataggaaatccattcttctctattcataatcatcaacctctttcctaatcttattcttattgtatcataattattaacgctttggtatatctctaaataccttttaaaattgaattgagttgattgcagcaacaattgcagctgcaatacttgctgatacagcagctagtccgccaccataaaccatacctgccattccgttatcggtttgttgtgcattttggtttttctttccttggaaaaactcaattgcacctacaaatgcccatcctaggccaccaatagcaaccaaagcacccatgacagtaataatttttgtaacaacttccattttttaatttctcctttgtttcgcaaaaaagaggcatcagcctctagttagtcttcatcaataatcacacaaggttcatcttctagtaagatgacttgtggagcttcttgtttatattcaatcatgatagaacctccatctatacaaaggacagttagatttcatagacagtttattgacttatctaggtcaatattcaaacaaataacgagccagggaatcgaaccccgttacgctcctaaaagcactcgctactaaccaatgtcttatcgtagttcttggttaaacgaaatctaactggcttgtattttaatgattaggtttatttattttctgacattattatgctataatgtcgatgtaagttttaaatttttataaatttttaactaaccccgatggccgtcggggtttttttgtgtagaggttgctgaagacctcttctttaagacgggtttatcaagccattcaaaccgtcctgataattttttaaaatttgtaatataacggccgattaaaatgtatagcatattaagaccagttaaaattacaaatgataaaagaattcctaaaattggttttaggtaatccatctagtccttcttacgttttggcaagaaaccaagtcctgctgcaataagaaatgcgcctaggcttgtaaggcttactgtaagggcagtgtcatcaccagtgtgtggtaacgcctctgtttcagtggctgctgcttgtttctcagttgacggtttagcttcaggagctttatccgttaccttatttggatcaggagccttgtctgttgacttatctgttggaacagtaggagtcaccgtcttagaagtggatggcttttcctcagtctttggtgttgttggaggagctggtgtcacaggtgttgtaggtgctgtaacaccagaagtcccgtctgatacatgactagcgcttgtatcaggagccttgtctgttgacttatctgttggaacagtaggagtcaccgtcttagaagtggatggcttttcctcagtctttggtgttgtcgaaggagttggtgtcacaggtgttgtaggtgctgtaacaccagaagtcccgtctgatacatgactagcgcttgtatcaggagccttgtctgttgacttatctgttggaacagtaggagtcaccgtcttagaagtggatggcttttcctcagtctttggtgttgtcgaaggagttggtgtcacaggtgtggtaggtgctgtaacaccagaagtcccgtctgatacatgactagcgctcgtatcaggagccttgtctgttgacttgtctgttggaacaggagcagtcacgctaaccgttgggctagttgacccgtcactgacaggagttgtttcatcagcgaaaacccctgatgatgcagttgcaagcactgctgttgagataagtgaaataaattttgctttattcaaagtctcatacctctcttttcttttccttgcggtgataaccgacaccgcttaagcgaaggaaggattggttgttttgcacaaattttcttgcaataactaaattattccgtttaacgactgatattgcttgaaatatagttgcaaaaggtacaatctcttccacgtttacaagtcgtccattttttcgctcttttttttggattgctgcgaactttggtcgacatttggcaacggtaccgtcttgaagatatagcattacaccaccttcaagaccgagttgcctgagatcggataatctcaaaagagtatcattcatttcgaactcctttttttgcttttgtttaacccaaaatagttaaatctgcattttgacgtaaggtttatagctttgttcacctcgaactcattaaggctggtagccacggcccgcttgaccaaccacacaattttaactgtgggtcctacctcgttagcacttacatcctgtaagtgtgcctttgttatacttgataccaggcgctagatatacttctactagctacgctttcgcccccatttcttttttttatgcctttagtatcactaatcaggacgaaagattattattcagttttcaaggaacatcaagcagttttaagacctgctaaggtcaaagctaaagcagcttgttacataccagttgaaatccaagggccaacgctgtcatatacccatccaacgccgttagcatagccttttaggacgctgcggtaatagagtcttccacgaattcggcggtactcatagtaacgtcttactggagtgtctgcgtgtgcgacattatcacctgtcttgtgctgaacagcactgattgttgcaccacccactccaagaagagcgactgcaagcatagctttagcggtaagtttgttagcaaatttcattttgctacctcctgaaaaacatttgtgacagtttaacgacttatccaggtcatgctttcaagaaggtacttacctatatttgccaggtcatccattagcattttcttgttttcgtttctcttgattgaaaacagctaggatgccattaaaaacaaattctgcaattttttctgtagaggatgcgtaacgcatattttctagggcgtattgataacggtcatcaaaatggcgcattacaaaatctgctgaagctcttgagaacccctcttgtcttagacggtcatatacaagtccccaaatataatctctatcgtactgtgttgcttcatcgacttttctgttaagcgtattttgatagttatcatcttgactagagtgagccatctcctcgtcatcgtcagaaggaatatcagtgtcactaatattagtatcactgtaatcagtatcattagtgtctgaatctgacacccccctagtctgaatctggtacccccctggtttgaatctggtacccccctggtctaaatctgacaccgggggggtatcaagttcagagaagtcattgtttacaagggttctagtagatttgtcgtcgattaattgacctagatatattctatttgcgagggtacctttttgactatttgactgcttaacttcataaatcaagccgtattctaagagttgctttttaattctcaagagtgtagattttgagcaattcaaaatttccatcaaattagcatttgaataaactagataaatatatcctgcttcgtcaatccagttatttttcagggaaagactcaagcgatcttttagaattgcgtaagcaactttagtgtcaatccgcatttgtttatagcggtcactttcaaaaagaattttgggcaatgcatagaaacgttctgacgtttgaaattcgtctgctgtaatcatctgaatttttgtcattacttatacctctttcagtctgaaatcaccgttggaagcaaaaccgactaagccaaaagcttcaagttcttcaatactggtgactgtttcctgacgtgataaccctgtttgttccatcaaaaaagaaataatagcttctcgtgaattttgctcgctaggtgtcatccctaacctccaaattagatttttttaacaaataaaagagaacgctcttaacgctctctttgtaatttttttattcttccaaatcgggacacatagtggaaattcctaatgccctccaagaatactagaccaggctttttgatagtcactgtcagttccaccaatagcaaatttgtaggttgtatctccaggcccatttttagcccaataagtatcaaccatttcaccacttacagaaacattacgaccattgacagacactgttgctggtttaaggcctgttgatttgagcacacttgccttaatagcacttgaatcgatattaaacttatctcccgttttaaaaatacctggattggcattgtagatggcggaagttaaacgagccatatattgcgcattataggtgtaacccgttttagaattggttggtgtattattgtcataaccagcccaaccaccaagagtaataccaggcgttgagacgatcaaccaagcatccgcaaagttatctgtcgttcctgttttacccatccagtcagctgaggctgctgcaccattgacatttttcaattcagaatgaaattgagttgttgctcctttaactaccacttctttgagcagattatccatgatactagccgtagctcttgaaaagacttgcaccccttcagatttatgttgatagataacttcgccagtccggtcagtaatactatcaatcatatagcccttctcgtagacgccaccatttgaaagcatttgataggcatttacctgttgggcaaccgtggtttcaatccctccaccaagaggtaaactctcgatattgtaattagcaatcttataccccatcttggtcatgtaaccctcaacatcaacatcatgacgttgaagcatttggtaagtccaaaaggctggaatgttccacgaggtattgagtgcctcttggaggttcatcatagctgtacccttatcaccatcatggagaataggcgttccacccgtaaaattagttgggtagttagaaaggatacttgagctccccatcaaaccttgatcaatagcaattccataagcaataataggcttaatagatgagcctggggagcgtgccgtatcaaaggcatggttattttgattattttcgtaactacgaccaccaacaaatcctagaattgctccagtcgcattatccatgagcacatttccaacttcaactccactattgccaccttggtcgaggaggccaccatattgactcgcagcatcttgcatcgcattataaactgcattgtcaatagttgtcttaacgctgtagccaccagtttggagctcttgaagggctctctcacgatagctttcctttgtcttatcatttttcaaatcttgactcgataccttgtcacgtttaacgaggtaatcatacatgacatcctgagcctcagacataacagaatagtacaaatagtcatgacttacggcatcagacttctcaccggccttgaaatccttagtgatatcataactcttatagctttcgtactgcgacttatctagatagccaccgcgataaagattgtagagtacatcttgttgacgtgccaagccataagaaagatcctctgcgttttttaattgaccgtcagctgtataaggtgagtagacaattgggctctgtggtaaacctgccagataggcagcctgaggaactgtcaaatccgctgcagatacgccaaagataccttgagcagcctcctcaataccagcaatatttttccccttgttattacgtccaaaaggagaaacattcagataatcggttaaaatttcatttttagaaacacgacgctccaattgtaaggcatagataatctctgccgccttacgtttaaaggttggtgcatctcctgttacctgttgcttgattaactgctgcgttagcgtcgaaccaccacttgaagagccaactcccaaaactgatgacaccaaagccctaaatactgcctttggcacgacacccttatgcttcttaaaattttcatcctcagtcgcaatgatggcatttttgacattgttagaaatcgcatcactctcaataggcgttctcagcaagtcagtgtcaatatccgcaatcttcttggaatcggaatagctcatcgaagataccaaactaacctcactaatctgattcaacaaggttttgtccttaatcgacggaacagactcaatttgactccccaaataacccaaaccaattcctgcaccgaacaaggtaaggacgataataaccacataaaagaaatcagacaaaagctttaaggtttttaagaaaacatcacccatgtctaagagtgtcatccggtcctcaggcgactttctcccttgcttacgattccacttagaatcagtcgtagctttcctttcattaaaagatttatcccctcttttagacctagaaccagcaaactttgtgcgaatagcctgccctagtcgtctaaaataatttattattttttcaaaattcatagaaatacctcaaagcctattataacaaactttgacaaagcttgcataggcctactttcttttggtataatggtgcagaatatactttactggagaatatcatgacaatttttgaagaactaaaagcacgtggcttgatttttcaaaccacagatgaagaagcccttgtaaaagcctttgaagagggaccagtctcatactacactggttatgacccaacagcagacagtctccatcttggacaccttgtagctatccttacaagtcgccgacttcaattggctggacacaaaccttacgccctcgttggtggtgcaacaggtttgattggtgacccatcatttaaagatgctgaacgtagcctccaaacaaaagaaaccgttgaaggttgggttgaaaaaatccaaggtcagctctctcgtttccttgattttgaaaatggcgacaacaaggccgttatggtcaacaactatgactggtttggttcagtcagcttcattgatttcttgcgtgacgtaggtaaatacttcacagttaactacatgatgagtaaggaatctgttaagaaacgtatcgaaacaggtatctcttacactgagtttgcctaccaaatcatgcaaggttacgatttctatgaactcaacgataagtacggcgtaactctccaaattggtggttctgaccaatggggtaacatgacagcaggtactgagctcttgcgtcgtaaagcagataaatctggacacgtcatcactgtaccacttatcacagattcaactggtaaaaaattcggtaaatcagaaggtaacgctgtctggcttgatgctactaaaacaacaccttacgaaatgtaccaattctggctcaacgttatggatgatgacgccgttcgcttcttgaagattttcactttcttgtcacttgaagaaatcgaagaaatcggtaaagaatttgaccaagctcgtcaccaacgtttggcacaaaaggttttggctcgtgaagttgttactttggttcacggtaaagaagcctatgaacaagctgttcacatcactgaacaactcttcgctggtaaccttaaagctctctcagcacgtgaccttaaagttgcccttaatggtgtctcaacttatgagatttcagcagatgaaaatctgaacatcgttgaacttctcgtcaatgctaagatttcaccttctaaacgccaagcacgtgaagatgtccaaaacggagctatctacatcaacggtgaacgtgtacaagacttagattacaccctctcagatacagataaaattgataatgaaattactgttatccgtcgtggtaagaagaaaaactttgtcttgacttactaatttatagctattctcactccttaatggagtgagtttttttaccaaaaaaagagcagacggattgattcccaactactctcttcagaacacaaaaaaaccagcactaggctggtttttgagactatcacattagttatagattttgaatgcgtcatcgtcgttttgaccaacgaatggcattgctttacgcaattcagcaccaactttttcgatttcaaggttagcagcttcttcacggtaagcagtaagttttggacgtccagctttgtagtcgttaacgaagtcgttagcgaatttaccgttttggatgtcagcaagaactgctttcatgttttctttcacttgttcagtgataacacgtggacctgatacgtagtcaccgaattcagcagtgttagaaattgattgacgcattttcttgaatccaccttcgtagatcaagtcaacgatcaatttcatttcgtgaagcacttcaaagtaagccaattctggagcatatccagcttcagtcaagacttcaaaaccagcttcgataagggcagtcaaaccaccacaaagaactgcttgttcaccaaacaaatcttcttcagtttcttctttgtatgttgtttcaagaagaccaacacgtgctgcaccaacacctttacaccagtccatagcgatgtctttagcgttacctgtagcatcttggtatactgcgtaaagtgcaggaacaccaaaaccttcttcaaatgtacgacgtaccaagtgacctggtcctttaggagcacacatgaagacatcaacatctttaggaactttgatgaattcaaagtggatgttaaatccgtgtgcaaaaccaacagcattaccagcttcaaggtttggagcaatttctgcttcgtaaagttcttgttggatttcgtctggagccaagatcatgataacgtcagccaatttagttgcttctgctactgtgtaagtgtcaaaaccatcttctttagctttatcaaatgatttacctggacgaacaccgatgatcacatcgtgacctgtatcacgcaagttttgtgcatgtgcatgaccttgtgaaccgtaaccgataacggcgatttttttaccgtcaagtgctgctacttttacgtctttttcatattccatttgaactgccatagtaatatgtctcttttctaaaaaaatattttattgcctttttaaggctgggttaacaaatttaagttggattttttaatcacgggtaaatccagtagcacccgtacgagcgatattcttgattccgtaaggacgaataactcgtagaagcgcctcgctcttttcagcatcaccagtcatctggatagtgatagagcttggtgccacatcaaccaccgatgcacggaaaggttgaataatcgccaagatttcagcacgcttagaagttggtgctgacaccttaactaggataacttcacgttccaagtgtggctgatccgtgatatcacggatacgaatcacatcaatctgacgattaagctgtttgatgatttgttccacttcattttgagaattcacatcaataataatcgtaatacgtgaaacgttaggatcctcagaagcccctacagagatactttcaatattaacttgacgtcgtgaaagaacacctgtgaagcggttaaggacacccgaacggttctgaagtttagctgttaacattctacgcattgaacttcacccccaacatttcgtgattactcttaccagccggaacgattggcaagacatgctctttacgagagatatccacctcgatgaacattggcacgtcttctttgataacttccaaatcctgatcaattgtctctggattatcaaacttgtaagacttaatgccataagcttgagccatcaattggaaatctggaagggtatcaaagacagactctgatgtacgcccttcgtagaaggactcttgccattgacgtaccataccaagtgagtgattgttcaacataacaaccttgattggtaccttgtaaatatttaagatagccaattcttggttcgtcatttggaaaccaccatcaccaacaaaaaggataacttctttatcaggattagcaattttggcaccaattgctgctgggacaccgaatcccattgttccaagaccacctgaggtcaccagttgacgctcattttggtatggataatactgagctgtccacatttgatgttgtccaacgtcagtaacaacaacggcatcacccttagtcaattcaccgatacgctcgataactgcctgaggctgtaccatacgttctttcttatcgtaagaacgtacacgctctttgtcttttgtgactttttcaatccatttttcagtgttattctgaaccactggctctgccaagagcatttcaagagcttgcttggcatcaccaacaactggaaggtccactgcaataattttaccaatctcagctggatctacatcaatatggacaaccttagcatttttagcaaatgttttaggattacctgtcaaacgatcatcaaaacgacaaccaatagcaatcataaagtcagcatcggtcatagcaatgttagccgcatatgaaccgtgcataccacccatacccaagaaaagggggtggctagtagcaattgtcccttgtcctagaagacttgtgacaactgggatttggtagcgttctgcaaaagcaactagctccttagcagattcagaataagagaccccacctccagctacaataaccggcttcttagctttacccaactgcttcaagattttcttgatttgcatttcgtttggtcttagcgtcggttggtaacttggaagattaatttcaggatcgttgatgaaggctgtttccttagctacgacatctttagggaggtcgataacaactggaccaggacgaccagttgttgcaatatgaaccgcttccctaataatacgaggaatatcagctgtatcgcgaatctgataattgtattttgtaatcggcatggtaattccgacaatgtcagcctcttggaaggcatccttaccaatacctggtgttgcgacctgaccagtaaagactaggagaggtacgctatcactcatagcatctgcaatccctgtaatagcattagtggcaccaggaccactcgttacaagagcaacaccgagtttaccagttgatttggcataaccttcagcttcgtgcagacttccttgctcatgacgagataagatatgattaatcttgtcatttttgtaaatagcatcatacaaaggaagaaccgctccgccaggatatccaaagatagttgaaatcccaagttcaagaagtgtatcaagaatcaaatcagcaccagagcgtgcttctttaagttcaattttcttcacatggacctcctttagtagttgtttttttcgaattgtctaaaaattcaaaaccttgtatactatgataacatttttaaccaaatttgcaagggtttcagagaaaaatatcacaaactcttcggaaagaatgttcttagtttttttcttgtgcttgacgttctgctttacgttcttcgaattcttcgtcactcatcaaagttccgccgacattggctgatttggcaaaggctgtatagcgacgcaaccaaccacttgaaatttttgatttgaaaggtttcaaatgtttgcgacgttcttcaagggttgcttcatcgacaagtagatcaagggtacgatttggaagatcaatcacaatttcatcgccatcttctattagggcgatattaccaccttctgctgcttctggagaaacgtgaccaatagcaatcccacgagtagctcctgagaaacgaccatccgtaatcagagccacatccttaccaagaccgcgtccgacaatcttagaagttggtgccaacatttctggcataccaggtccaccctgaggaccttcgtaacgaatgacaacgacatggcccttcttaactgttccattgtcaatcaactcaagggcttgatcttgtgaatcacaacaaatagctttaccgcggaaagttttaacagatggatctacaccaccgaccttgataacagccccatcttgagcgatatttccgtaaaggatcgacaaaccacctacaggtgaaatcggatgttcgattggatggataatttcttcatttttgatttcagcaccagctacattttctttcaaggttttaccagtaactgtgatacgatcacccttgatggctccttttttgatcaactgattgataatggctggaacaccaccagcttcatgcacatcatgcatggtgtaaacacttgaaggagcaattttagagagataaggtgtcttcttggcaatttcgttaatgtccttaaggtcatagtcaataccagcctcacgcgcaatagcaagggtatggagaacagtattggttgaaccacccatggccatatctagagcaaaagcatcatcgatagcttctttggtcacaatatcacgtgggcgaacattgtttttgatgttatccatcaattttgtggctgcttgacgaaccaattcacgacgttcatctgaaacggctagaacagtaccgttacctggaagggcaagacccaaaacttccatcaaacagttcattgagttagcggtaaacatccctgaacacgaaccacaagttggacaagcatttttctccaaataatcgagctcttccttgctcatatctccagcctgataagtacctacagcttcaaacaaacttgatagcgtcgcttgatgaccagtcatgtcaacgccacccttcataggtccaccagaacaaaatactgctggcacattagtacgcatggctgccaaaatcatccctggcgtaatcttatcacagttaggaatatagaaaaccccgtcaaaccagtgggcattaataactgtttctgcagaatcggcaatcaattcacgagatggaagactgtaacgcatcccaatatgccccatggcaatcccatcgtccacaccaatggtattaaactcaaaaggaataccgccagcctcgcggatagcttccttggcaatatctgctaattcacgcaagtgaacatgccctggaacaatatcaatataagagttacaaatagcaatgaagggcttttgcatatccttggcagatttaacttgcccagtcgcatacaaaagtccgcgtgctggtgccttatcaacaccaactttgatcatatcacttctcatgatgttaccttcaatctataaaatttcttacaacatatgttaccactttggaaagtaatgtcaaggaattttcagaatatttctgtaattccgaaaagatgtcccaaccgtatcaaaactgacaaaacaaaaaggaagccctaagacttcctaaatgattatttcaatattattcaacactaaagaggtatggataaactggttggtctccttggaagatttcaacttcaatatcttcgtgagcctcttccaatttttccgcaagtgcttgagcttggtcttgattaccttcttcgccgacgtaaatcataacaatttcactgtcttcgtcaatcatcttgtcgaaagtgtcaagaagggcttggtccatatctggtgtagacacaaggatcttaccatcaaccataccaaggatatcattttcatgaatctcaagaccatcaatagttgtgtcacgtaccgccaaggtcacgctaccactcgttacatctgaaagactagctgtcatagcttcaacgttcgcttcgatactttgactaggatcaaaagcaagcaagcttgtaaagccttgtggcaccgtacgcgtttcaacaacagccgcattgacatctactacttcagcagctgattgtgctgccataaagatgtttttattgtttggcaagatgataacattcttagcattaacctgctcaatagccttaacaatatcttctgttgatgggttcattgtttgaccacctgaaatcacatagtcaacaccttgtgatttgaagatatctgcaagtccatctccggcaacaactgcaataagggcaaagtctttaggagcagaaggtgcagcttggatagcctcttctttttgaacttgtgcatcgtgttggttacgcatgttgtcaaccttaactttgacaagagccccatatttaagaccttcttgcatgacaagacctggatcctcagtgtggacgtgaactttgacaatttcatcatcgttaacaacaaggagagaatccccaaggttactcaagtaatttcggaactcttcatagtcaaagtctttcacataagttggaccttgtttgagaccaatcatgatttccgtacagtaaccgaaggtaatgtcttctgttgcaacatgaccagcaactgacttatgatgttctgcattgatcatctctgtcatcgtagctggtgtcgcttggaagtcttctgaagcgatatactcacctgtgagggctgacaagaaaccttcataaatgaagaccaaaccttgaccacctgagtctaccacaccaacttctttcaaaactggaagcatctctggtgtcttagccaaagcagctttagctccgtcaagagctgcacgcataacctcaacagcatcattcgtagattcagctttcttaatcgctgctgaagctgcgccacgtgatactgtaagaattgttccttcgacaggcttcataacagctttataagcaacttcaacccctgcttggaaggcatgagctaaatcttggccgtcaagttccgttttatccttgatactttgaccaaatccacggaacaattgtgacgtgataacacctgagttaccacgggcacccatcaaaagacctttagacaaaatctgaccaacttcaccaactgttgaagctgattgatctgcgacagctttggctccgttatccatagtcattcccatgtttgttccagtatctccatctggtactgggaagacattgagtgaattcacatattctgcttgcttacctaaacgtgttgctgccgcttggaccatctcctgaagcaagcttgttgtaattttagacactagttttctcctacgactttaatattttgaacgtaaacatttactgtttcagccttgataccgagttgattctcaagattaaatttcacacgttcttgaatattttttgaaacctcactaatcttaacaccgtaactcataacagtgtaaacatccacagtgatacctgcatcagtagatttcacgacaactccttttgcgtagttttcctttccaagaagtgcttgaaaattatctcggatagcactcttacttgccataccgacaacgccaaaaatttctgttgctgaaccgccaactactgttgcgatgacatcatctgacaattcgatttgaccatcttttgtattgatttttacagtcataattactacctcaaaaagtttttatcagcttattttaccatattcgagcctacttgtaaaaaataagaagaagataccctttgaataagagtatctcctcagtatttatcattaaaactttctctttacgagataacgacgatacatcacgtagaggaagattgcacgccatacattatcaacaacggttgcaatccagacaccagcaagacccatccccagactcaccccaaggaagtatcctgaaaaaattcgaatgatccacatcccaatagtcgtcgcatagaaaggcatcttagccttacccagaccctgccaaactgctgtataaactaaagtccccgaagtcacaggattcccaaggaaagaataaagaataactacctgactagccgcaatagctgctttattatctgtaaagagacctgataatccttggccaaagagtaagatactccctgaaaccagaaccatcaagaaggtggaaatccaataagactctcgtataatacgcttcatctgcgtcttatcccctcgacccagactattggcaaccaagataaccgtagccgtagcgactcccataccaggcatatagttaaactgggtgaggttttcaccaatggcattaccaccgacaacggctgtaccaaaggtaacaataatagccacgatgaccacatctccagcacgcatcatcagtcgttcacctgctgctggcagtgcaatccccaacaactctctattaaaaggtttggtaatttcaagctgcttcacatctagtttcatcgcttgccagagtatcactgtcccaactagacgagagaaaaccgtagctgtagctaccccaataatcccccaatgtcccacaaagatggctaaagaagataaaatagcattaagaacattggtcaaaagactgacgaccatggaaatacgaggccgtcccttggcccgtaggatgttaccaaaagtagtcatcaaggctaagaagaccactcctccaccgacaagagcaaggtagagactaccagcctgagtcacagattgctcagtacctaaaagattaagaatggccccaccaccaaaaatggaaagtagaccaaggatgagactaagagcaagggtaataataatagcatcccaagtgtctcggttagtcgctttaacatcaccttttcctaaacttctggcaatgacactggcacttgaggctcctagagcaataaagatagcttggtaaatcgtaatgatattattggctacggaaacccccgatatagcgacaataccaacctgggccactaggtaagaatcgacaacccccatcaacatttgtagaaggttttcggccatagcaggcaaggctatgtttagaattttctttgtttctgtcataatattcttttctatattgataaaaatagggctgatttctcagctcctatttttttattcttatacaccaagatagctttcaactgctttttgcatatcagctgccgcaacaactgttttatggcgaacttctgcatgttcaagtccatctacagccgctgggatagctacacctgaaagttggtgcaaatcttctaccgctttgaaatcatccccactgtctttaccagtgacagctgaaacggccacacgtgggaatttgtatgggctagctgttgaagcgataactgttggtgtgtggtcatctgtcttttgaacatatgcttcgtaaacagctgaggcaactgctgtatgaggatcttcgatatacttgtcttcatcatagacacgcttgatttcagcagctgtttcatcctcagttgcaaaacctgctgcaaacaaatcaagaatatctttatctgcatcagccaaagtatactcacccttagtcacaagtgcatccataagctctttagtcttagtagcatcattaccaagaaggtggaaaatcaagcgttccaagttagaagataccaagatatccatagaagggcttgttgttaccttgaagtcacgtttcttgtcataagtacccgttgcgaagaagtctgtaaggacgttattttcattagaagcacagattaatttgccaactggaacaccaatctgacgcgcataataagccgccaagatgttaccaaagtttcctgttggtactgtgaagttcaccttatctccgttttggatatgacctgccttaaccaactgtgcataggcatatacatagtaaaccacttgcggtaccaaacgaccaacgttcattgagttagctgatgagaattgcgtatgatgagccaacaatttctcacgcaaatcaacatcattaaacatacgtttcacatctgtttgagcatcatcaaagttaccatcaatggcaataacgtgagtgttagctcctgtttgagtggtcatttgcaattcttggatttttgaaacaccgtcttttggataaaagacaatgatttcagttcctggaacatctgcaaaaccagccatggcagctttaccagtgtcacctgatgtcgctgtcaagataacgattttattatcaacaccttgctttttagctgatgttgttagcaagtatggcaagattgaaagggccatgtctttgaaagcgatggtagaaccatggaaaagctcaaggttgtagtggttcttaagtttaactactggtgcaatggcagctgtatcaaacttgtcatcataagcatttgtgatacagtaatccaattcctcttcagtaaaatcatccaagaaagctgacaagaccaatttagcaacttcttggtaagaagcatctttcaattgatcaaagtccaaagtaacctcaggcgttgacaacggtgtgaacaaaccaccatctgttgccaaaccttgaagaatagcctgactaactgttactttattattttcgtcacgtgttgattggtatacaagtgtcatggtaaatcctctttttagatagtctgtggctctattgtagcataattgtcagaatatttctacacgtattgtgacttgtgagaaaatcattcggatatcaccctattttctcctctcaaaaacatgaaaaaatccggaatagctattccggatgtcatcttaaaatttatctttggtgtcattcttagttgagaaagtgatatcttttgattttccatcaccactaagcgttactttcttatcttttttagtcacttttagctcttgaccttttttcacattgagaccatcaatatcaacgtctttgttgacagaagtaacggtcatcttatgtcccaaacggctaaccttccctttgaaaagggttgtcgttgtttcgcctgtcttcgaatcatacttttgaccgctgtcttttgcagctttttcaagagcttcatcaagttctttttctatggtttcctcactgtaatagttttcaaaggaatctccatagaaggctttaaataaatctccaaaggctgagaaggacttctgaaccctctcacgatagtccttgatataagttttcttatcaaaagtatagctagcagtcaccttcgcattgctaccttttactttcatggttacagcagtatctgtaaagtacttttcaagctccttactatccaagtctgtcaaactttcagacatgcttgaactatactctctacctagagaactactgtaccatttgccatcaatattacctgtcacataacggtaagtcataaagccaccgatacataagaagacaaggactaccgctgacaaaactgagactaggatgcgttttttctttttgggatccattggttttttaggagccaaatttgccatagctgcttgtccttctggaaaagctactgtagaaggtgctggcgctgttactactggtgccgtttctgttggtagaggactagtgcttgtctcgacgatttctgcctcaaccttaataggttcagtagtaactgtatcttcagttttagccggtgcttcattaacaaactctccagctttcaaagcatccgccatttcctgaacactcggcttacgtccgtttaccgtctcaaaatagtccaaccattcttctcttgtcatttatattcccctttaatttccttttttatttattttttgtaaagctaatgtcaccaaattcactgtgtgccttgatagtaaaaccttcattgttaggcgtataatctaatacatcaccttttttaaaagcatctgaatctccagccttatccacagtgattgtttgctcccaacggttaatatcacccgtgaaagcagttgttgtaacacgaccggttttggcatcgtaggtataactctttggaagttctttcttcactgtctcatcaaactgtttatagtagtctttttctgacaatgaataactatcaaaaacctccgagaactcctcaccgtactgacctttcaattcagtaactctacttttgtaagcctgataaagacctttacgattgtaaacaaagctcacttttaagtgagccttattgtcagtaatgctcattgctgtattgatatcggtgataagatcttgaccttgtggtaaagcattactaactttattcttagtagtagcagtgtctttcagagtggctaacattttctcactaaaggttttgcttgtccaatcgccctcaatgcttgcagctcgataacggtatcccatcacgagacaaacaatcaaaagtatggtgagtatcgctgcaatcacacctgataccatccccacaatattcttcgaggttactggctcctttgattcttttacttgttgactaggattgaattgaacactcaccatcctatcagcattaaactctttaaacttattagtcgctctattccctgctgtagaagccattggtggcctcaattcatgaggcttgagaggatgtgctgtttcacccaaactaagcccttcttcttttgtcataggaatctccttatcttgctgtaaggttattataacaattcttaaagcgtttttctatcttattcgggaaagtcctttatttttaatttggataaacactctaatatagaggatttctagcaaaaaaagtagcccttatagagctacttttgtctatcgcttaccctttgtaatcaaaggcaatttcgataatttctttcaattctgaaataagtggttctttcggattagctgttgtacattggtcttcataagcatgttcagccaaagtataggcagtgtcttgaagaagtttcttagtgacaccttgacccttccagttcatgtcaataccaacggcaacacccaattcgtatactttttgtgccaaaacttcaaccaattcagcatctgattgtttgtcagtaccccatcccatgaaacgagcgatatctgcgtaatctttgtctgcacggaagtagtcatatttagggaacatagcgtgtttttgaggatcacgaccattgtaacggataacgtgaggcatcaaaatcgcattagtacgtccgtgtggaatgtcaaacatagggccaaccttgtgagcgagtgagtggttgataccaaggaaggcattggcaaaggccataccagccattgttgacgcattatgcattttttcacgtgattcttcatcaccaaagcggtaagaatgttcgagattttcaaaaacaagtttaatcgcttgaagtgaaagtccacgtgtatagtcgctagccatgactgatacataagattcaatggcgtgagtcaaaacgtccatacctgtatcagctgtaacgctggcaggtacactcataaccaaagcagggtcaacgatagcaatgtccggagtcaaagcataatctgccaatgggtacttgatatgagtttcactatcagtgataaccgcgaatgacgttacctctgaacctgtacctgaagttgttgggatacagataaatgttgtcttctgagcgtaaggaatcttgtaagtacgtttacgaatatccaagaatttttgtttagcaccgaagaagcttacatctgggtgttcaaagaacatccacatagccttagcagcatccattgcagaaccaccaccaagagcgatgataacatctggttggaagtctacaaagcgttccaaacctttgtaaaccgtattagtagatgggtttggctcaacatctgagaaaacatctactgctggtctgtggcggttaagttccaattggcgtttaaccaagtctgcataaccaaactgaaccataccagggtcacaaaccaacatcacgcgctctgcatcaatgtgacgcaagtaagttattgaatctttttcgaagaagatttttggtgggacgcgaaaccattgcatgttattacgacgctttgacaatgttttgacattcaagaggtcgaatgagctaacattgtgtgacactgagttatgaccgtgtgatccacaaccaagagtcaatgatggaatcatgttgttgtagatattaccgataccaccttcggctgatgggctatttaccaagacacggcaggccttcatgcgaataccatattggagttggaggtcttcattttcagtgtgaataacagctgtatgtccaagaccacccaaattgagcataccttctgcttttttgaatccatcttcaacgccatcagatttgataagagcaagtactggagacaatttttccaaggcaagtgggtgttccattgttgcatctggaatttctgccaagagcatttttgtgccagcaggaactttaagaccagctttttcagcaatttcaatagctgagtgacctacaatagcaccatttacagctgtacgtgcttcattaagaacgactttttccaatttagcgatatcagtttttttagaaatgatgacacattgatgtgcttcaaattcagccttaacttcgtcgtaaatagctgcatcaacaatcgctgcttgttcagaagcacaaatcataccattatcaaaagtttttgaaacgatgatatcattgacagcacgtttaaccttagcatctgccgcaatataggcaggtacgttaccagctccaacaccaagcgctggcttaccagttgaataagctgccttaaccatacccggtccaccagtcgcaagtaccgtagcaatcttaggatggttcatcaaaagaccagtcgcttcgatagatggctcttcaatccactggatacaatccttaggagcacctgcttcaatagccgcatcacgaacaatacgagcagcttctgcagatgatttttgagctgatgggtggaaggcgaagacaatagagttacgtgtcttcaatgcaatgagggctttgaaaatcgttgttgaagttgggttagttgttggtgtaaccccacagataacaccgaccggttcagcgatagaaaccaaaccttgttctttatcttcagcaataacgcctacagttttgtcatatttaatactattccaaatgtattcagaagcatacatgttcttgatggctttatcttcataaataccacgccctgtttcatcaacggccaatttagccaaatacatgtgtttatctagggcagcaatcgcagcttggtgaacaatatggtccacttgctcctgcgtaaagttagccatagcatcaagggcttcaacaccctttgttgccaattcatcaattactgtttgaacatctttagtttgtttagtcatatgaaactcctttgaatacttgttaaaaacttcacaagctttaacacaagtatattataacgttttctagtcgttatgtaaacccttacaacgacaaaaataaagaaatccatccatttttggacagatttcatcattattaccaaataatcacacgatcttctggggcacgccacatgccgtcgccttctttgacgtcaaattccttgtggaattcgtcgaagtttggtagttgaacattggtacggagttttcctggtgcgtggacatcgacacttgcaaggagttgcatatattctgtccgagctttcatgcgccagatgcgagcaaagttggtgaagaattcttctgctgagaaatcctcctctttcttagcggcttcaagggctgcagcgatgcctccaagatccgctacgttttcagagacggtcaatttcccgttaatcttagcaccgtaagagtcttggccttcgaactgatcgatgactttttgcgtgcgagcggtaaaggcttcgtaatcttctggtttccaccagtccttcaagctaccattctcatcaaaggaagcaccattggtatcaaaagcgtgtgaaatttcatgggcaatgactgcaccgattccgccgtagttagctgatgacgattggtgaagatcatagaaaggtgcctgcaaaattgctgctgggaatacaatttggttttgttgcggatcatagtaggcattgaccatatttgctggcatatgccactcacttcgatcaactggttggttccacttactccagctatgagcaattgaaatttcgtagagagcttgagcattttcaaccaaggttttgctctcgtcgataatcttcttggcataagtttctggtaacttttcagggtaaccgatatgaggtgtgatgacattgagtttgacaatggctttttcacgagtctcaggggcgagccaatctgctttttctagacgagccttgtaaacctcaatcatagttgcaactttatgctctacgtctgcttttgcttctggtgagaatttttctcccgcataccataatccaagcgcttggctataaggcacttctgctaatgacaaggctgctttttctttggaacgaggttctggaacacctgcaatcgtacgactatattcaccagccaagacacggatttcttcagtcaagaataaagtccaatctaaggctgcaccgagtttcaacttggcatgaatagtttcccagttagctgttgagtagaattttggtgcgaattccttccagaaacgctcttccggtacgataattttatctggtgcttgtccaatcacttctgtaaagaaggcatcgagaggcaattggggaaccaaggccttgaaatccgcccactcatagggatggtagagtttattgtactctgatttttcttcgtttgataagacatatttggccaattctgcatcagcttcaatgaccttatccaggatatccttgatttctgcctctggaaaatcaaattttggtaagagtttttccatcatctggcgccagatggcaagcaactctggtcctttttcattgccttcttcatagtaggtcgtatctggcaagattaaactaagtgctgatccccacaagacattcatttgggcattcataaagtctggtgacacgctaaatggcataagattgggtttgccagctagttcataggccgccaatttacttgtatagtcttcaaaggaagaaagagccttgatttcattgatatagggcatggctggagctacaccagctgcttctcttgcatcaaaatctgctaccatcttatgatatttgacaaagttttggagaatactgtcttcgggcaattcttcacctcgttgccattttccagtgatatccaacatcaagttttcgatatcttggtccaagtccataaaaccaccggttgaaggtttatcatcaggaattacagcggtctccgcccattttccattgacgtaatcataaaaatcatcttgtaagcgtgtcattacacttcctccatcaacattaaaagtgctttcattataacaaaattccccagcaaaagcatttactgaggaaagtttggcttatttaactaaaattgctagggtttgataaggcttaagacttaccttttcagcaagctctacatcgtcatagtttgacaagaggacatgccctgactggtattctgctggaatctccacttcagcttcacttccatagaaattattgagtaccaagagtttttgaccgtctaaatgacgctcaaaggcgtagacttgttgactatcttcaagtgctggctgatagctgccttctgaaatgataggcatttctttacgcaagcgaatcaattctttatagaatttaaagattggtccgtcgatttcattttcaacgttgatgtctttataagatttaccagctttcaaccatggagtgcctgttgaaaaacctgcattttcagaagcatcccattgcattggcgtacgagaattatctcgtgacttagcttggataatcttaaaggcttgctcaggtgacttgccttgatccaaaagcatttggtaagcattgatggactcgacatccacataatctgccatcgaatcatagtctggatcaatcatgccgatttcttcgcccatgtagatatagggcgttccacgtgacaagtgaatgctagctgcgagcatggtcgctccttcattgcggaagttcttgatatctacaaagcgattcaaggcacgaggttggtcatggttattccagaaaagggcactccaaccaccacgttcactcatttccttgccccatgtatgatagagacgtttgagctcttcaaaatcaaagggagtaatggtccatttttgaccatcttcatagtcgactttaagatgatggaagttaaaggccatagacaactcgtggcgctccggtgctgaatacaaaacacagttgtcaatggttgtcgatgacatctctccaactgtcataaagctatcatcagaaccaaaggtcgcttcattcatcatacgaagatagtcatggacaattggtttatccgtataagctggtttcccttcattttcagggcaatctaccaagacctcatctttcccaatcaaattgattacatcgaaacggaaacctttgactcccttgtcacgccagaagttgaccaccttgaacaactccttgcgaacatttggattgcgccaattgaggtcagcttgggtcacatcaaagaggtgaagataatatttccctgtatctccaaaaggagcccaggcagaaccaccaaatttagacaaccaatcggttggttggtcttggatgaagaagaaatcttggtaatacttatccccagctaatgccttttggaaccactcatgctctgttgagcaatggttaagcaccatgtctagcatgaagtcaatcttgtgctctttaccgacacggaccatttcttcaaaatcagccatatctccaaagacagggttgacagctgtgtagtctgaaatatcgtaaccattatcacgttgtgggctcggatagaaaggattgagccaaaccatatccacgcccaactctgctagataaggaattttttcaatgattcctctgaaatcaccgattccatttcctgtagtgtccttatatgattttggataaatttggtaaacaacctttgttttatctagtgccatttatttaacctcttttttatcaaagggtggaccgtaacgtttccaccccttagcttattttgttcgatgagcgatcatgagaacttcaccacgtttgatatcacgtggaagatccccttctacgtctgcttggaaatcatcttgatttgtaatgattactggagtctcagtgaccaaaccagcttctttgataacatccatatcaaagctaatcaattgttgaccaacaacaactttatcaccttgttcaacatgagccttaaaaccttttccgtcaagactaaccgtatccataccaatgtgcattagcatttcaacaccttcttcagaaacaatgccgactgcgtgcttagttgggaagagtactgtcactgtaccatttactggtgaaaccaattcgccttggcttggttcaatcacgacaccttgacccattacacctgatgagaagactgggtctgtggcttgactaagtggtttaacttggccagcaagtgggctaacaacctctgctgactcagcaagaaccgttggtcgtaccaaaccttctgaagcttctttaagcgcttcttgtgcatgcccatcttcctctgttttcgttaaaaatccagttttgtggaagaggaatgtcaataccatagcaactacaatatcaacaatcataataatcgcaaagattgcccaatattgaggtttaattgagaggattgctggaagaccaccgataccaatagagtttgcttgaactccaaaaaccgctgaaagcaagcctgacaaggcagacgcagacatacctgctactaatggatagacatacttaacgttaacaccaaaaagtgctggttcagtaacaccaagataagctgaaatagttgccggaagtgaaatttgtgcttcacgttcatcgtgacgtttaataaagtagtaagcaaatactgctgaaccctgtgcaatgttagagagagcaatcattggccataaaccagtaccaccagcagtacgcaccaactcaaggtcaatcgcattagtcatatggtgaagaccagtgataacaaatggtgcatagatggcaccaaagattgcaccgaagagccatttaacaggaacaggaccagtcaaaccggccaataccacacctgagataaggcctccaagccaccaaccaattggaccaagaacagcgtaagaaaggataactgctggaaccaacgacaagagtggtacaaaaatcattgagataacttctggaatgtatttacgccagaaaatttcaaggtaagaaagtgttaaaccagccaagagggcaggaataacttgtccttggtaaccaactttttcaaaaccaaggataaagtgtggaatatctcctgcagccttgtgagccgcatattcataggcactaagcaagctaggatgaaccaagcaaatcccaagtacaataccaagaatttgacttgtccccatcttacgagagacagaccatgtgatacctactggcaagaaaccaaagatagcaccactgatgactgaaacaatttcattaacaccttcccagaatttcgagacctcaacaattgttttaccacctagattactgaattggatactacccaagacattttgcagaccaagaagaagcccccccaacaatcaaagctggaatcaaaggcgtaaagatctccgctaaggttgtcataacacgctgaactggattttggttgctcttagcagctgatttagcagcttctttagaaacaccttcaatccctgatacagcagtgaaatcgttataaaagattggtacatcattaccaatgataacttgaaattgacctgcattggtgaaagtccccttaacagcaggaatggcttcgattgttttcacatctgccttcttatcatcaccaagaacgaaacgcatacgcgtcgcacagtgagtaacagcagtcacattttctttaccgccgattgcagcaagcaaatctttggcttcttgttcaaatttacccatttgaatctccttttcttttttaacaatatctgattgacttgataaactgattgtaagcgattacaaatttgtctgcaagtgttccgagatttttttaacatatttttgtaaaaaaacatcggttgtatgtttttttacctacaaatgaggagaaagatgaaaaaatatcagattatttataaggatttagaaaaagctatccatgagcaaaagtatcaagtgggagactttctccccaccgagcaagaactggttcaatcttaccaggttagtagagatactatacgaaaggcattaaccttactcgttgaagaaggcttggtcaaaaaaattcatggctctggctcccaggttattaaccaggaacaaatcaactttcctgtgtctgaccttactagttaccaagagctaatagaacaacaaggccttaattcgcaaaccaacgttatttctctggataaaatcatcgttgattccaaactctcagaaagaactggtttttctaatagccgacaggtctggcgtgttgttcgtcaaagagtcgttgatagctgtgcctctgttatagatattgattacctagacgccagccttgttccgcaactaaaccgtagcattgctgaatactctatttacgactacattgagaatcagctcaaccttagcatttcccactcctttaaagaaatcactatcgataatgctaccgatcaggataagattcttatcgacctaggtaaggaccagcacgtcgtctgtgtccgttcaaaagtttatttaaacaatggaaaacagttccaatttacggaaagtcgccacaaacttgaaaaattcaaatttgttgattatgccaagcgccatcattaaaacgaaaagcccagctaacagaaaaagtatcggacaagaatgtccgatactttttagtttttacggataggatctgctagatactccgcacgagcaccaccaattaacttaggacgactagccaaagcagtcacatgggcaccacctaattctggaataatagggcgaagaggaacttggaccctcttcacatgcataccaatagaggtatctccaatatcaataccagcctgagcgacaatttcctccacctcaacaggatccttcatatagtcgaaagcagccagctgaccacttcccccagcgtgcaaggtaggaagaacattcacaatttccaaatctttagccatggcaagctcacgctcgacaaccaaagcacgattcaaatgttcacagccctgaacagccaagtaaatccctttaggttccaaaacctcaagaatagttttcacaattcgttgaccaatttcgcggctagaggctttgccgatagtcccaccagcaacctcactggaagacaggcccaagacaaagatagctcctctcccaatagctgaacgttcaacaatatcttctacaagcacacgtgtcttctcttctaaatctagcaacatcacaacagccctcctttagacaacagctgtattcaggattcgcacaataagatagtacagaatcacaaaaaagacaaggaaaaatgcccctaataataataactgcctacggcgtttcttacttagatcccaggagaaaccaaatcccatcaaaaaaggaccaacactataacttagcataaaccataaatctacacgtgctatatgccaaaaagaagaaataaaggccgccaaacctattaaggataagatccaagaaaagtcccaacgatctggtttagcaaaagccaaacctattaagaagcagcccaaggcaggcatgataataaatgatagggtcataaaataaaacatgccattattatagcatgttttacagtttcatgttagtggcggttaataacaccataagcaatagtgaatgcaatagcagcaatacctacaacgattgccatgatagcccaaaaaatagtcatcgcacggcgtcccttacgattgttaaaaggaagtccccaaccaaccatgataacacctagcaatccaagccagattttataagtgataacaattgccgaatcaaaataggcaaaagcaaccaaacctaaacctagcaaagaaatcaaataagaccacttacccttcaaaaatgaaggcaaggcccaaccaaataacactaaacctagtagagcaagagctccaccaccaaaaaatacaggtacaatataattatcaaacatattcatattatagcatatcttaaaaagttaggaaatagaatctatcaaccaaagccatatccactctttaaaatttgtttactctcaatcatagattaattggcagatactaactatttattttggtacaaaaaaacaagacccagaaaggaccttgttttaataagctaattaagctttgtttgctgaacatagttgatttattcactatacttcccattacgccgtaaaacgctatatttaagatttcaaacaaccatattaataggaagagaacttcattattcctcttaattctataaaaagtgtggctaatttgaggcaaaatattaaattgaatttgccacaaatcataaaacctggtttgacacggttgaatttcaagtaattttagattagcttgatttcaatctttagcaaactcgaactggattttgatttcaaaaaaatgaagaagtttgattgaatgagggagattcttagactatcatagcaccacaaaaagttactaatacgatctttaataatagtatataatagaagaaaatggaggtcaactatgctaaaaaatgcgattttatctgcagatagaaaataccgttacatactttcccgtacttgggatgagacaaaacccactgtattgtttattggtttaaacccatctacggctgacgaagaaatagatgatcctacaattcgtaagtgtatcaattatgctaaaagttggggctatggaaaaatcctaatggccaatctttttgctttcagaagtactgatccaaacaaccttaaacatgaactggatccagttggctcagaaaataatacttatatcctaaagtctgcatctaaagcagatttagttattgcatgctggggaaatccaggaaggctttttaatcgtgataaagaagttatctcattgatacctaacttacattgcttaaagaggaataaaaatggaacccctcatcacccactatatctatccaaagatatcaaaccgtcctcatacaaaggatagattataaactttccgaaacttattcaatattggggacgatacaagtagataatcgtatccataattgccactgaatacatgaaaaaagcactttagttgatagtaacagaatgtgtgttatcagctaaagtgctttgttaaattgctacattctcaaaaatttttctcttgcctcatttgaatcttccattttgaaaatccttataaaatcaagatagtctgaaaatcgttcttctgggatacatattaataattcttcaacattagtttcagattgattcaggccccagtcgtttagtattccaaccaattcatcagaaatacgaatatcacgttctctaatttcatcaagtccccagttgttattactttgagaaagttcaagtaatataccaactttagatttcctatagctttcttttttcttagcaaagtatccattacttgcgataatattgagcctcttttcgaagggaatcttatttccaatatgttcaatcaattctttaacttcagaatctgaattcgttggaaaataacttgattgccatttttgaggaaggatatgttcaatctcccatttttctggtaataactctgattgatgttgataagctatgatctttaaaatcatcctgactgtattacgatgcgcagttttaattttatctgacaattctttctcatcgatttggccgaaattgaatttgggttgtgctgagttaattatttctgcatttaaattcaagattccagttttaacggcattaattgtaggtgttatgatgtattttgccgatagaactgctaataatctttttaaaaaaataagaaagtcatcttcaaatgtatctttgtaatgatagtgtaagtaatagataacaacaggatatttccaaaactcattaggataagaggtcaaagtatccaaagtttgttttatttcaatattttcggaccatttttcattttctagtaagactctattatttatcacaatccacaaatttaaaatagcatttaaattttgcattaaatcttgtgagtacagtttttcgaaattattttttgcataatattttctaataccaggagtggttgtcttgcgatcgttttcatttgctctcaagtaaaacatatagtagtaaaacaacttttgaatactttccccagcatttgtagcttgttcatctagttcttgccagagttctataaattcctttttttcatctgaattcaagtgattataaatttttgctttaaaaatatcggcatctgataatgctagtcctctatcgtttagagttgaaaaaatagttagtgctgtttcttgactatcggctgtaataggaagaagaatagcttgatttaatatattactgatgaagttataaaaggacaatggattatctgcagcatattcatcaactagttgctggagcaatctataatttttagcatagttactggttgatttttcatctgcttttccagagactagtatattagcaaattcttgatttccctcctctcccataactcgggaactaataaggatttcattaaagttaactactcctgtagttggattctgtttccaaattgttggttcaatttgacttttcaagaaattagtctcaggaccaccactttctaatttagtataaatagctctcaatagcagaaataggcttgtaatacgctgttgcccatcgattatttcctgttctttattatcattttcatatgaaactattgtgccaagaaaataagtattattttcatcttctgttgtattgagtgtgtattcagttagatcatcgaataaaacttggatttgttcgtctgaccaagcatatggtctttgatattcaggaataataaatcttttattctttccagtctctaatagttgtttgacgcttcttttgtcaacatttattgatgtagtcatagaagaaattcctttgattagtttataatatagctaattatatcaattttttagttttctttctaagaaataactattttcccgaaactttattatttgctgttataatagacatgcaaaacttgttccaagaattttttagacttgttatcatcataaatactgattttaagggatttgactactagtaaacttaacaacttttatatattttatactatataggatagtaaatggacagtgacagcataattgaagagtgaacaaaaagaggtataaaaacacctcttttttgcataactatctatttttagaacttagttgaaacaatattgtctacccttccataaaatagaaaatctactcaaatctaaaacttttttcacccaaattaaccttaaaatatttgaacctcgtatctgaatctggaatcgagaattcgaagctttttttagttccattttcccatgcatatcttgggttaaactgaaaaccagaataaactttatcattttcatcataaaaatcaatgttaatatctatgtaattgatgtaatgacctgtagtattttcaaaattccctatgtagcgtttctcattttctgatacacccgaaactgtttcagctacaaagttttttttatcaaaagtatttactaatataccgtaaactctattaaattcttttatagctttaccagctttcaatatgctatctaggctatttttatcttgaacaggaattccgactattgagttaatatctagaagcaattcataacgtttcctttggtatttattccattcacttacaaaagtactgtccactaaatcttgattttctatagcttctctttcattcctttggatgttaatatatgtgttagctagtctctttaacttaggatttttaaatttcctatttttatactgttcaatttcaattagttcataatctatataagatttatagtctttaatttctgcttcatcatcattctttaggtcactaactttccaacgttcatccaatccttttgccaatgaagttatgaattcactatcataagtcttattgctgttatcgattgatttaaatatagatattaacaaaagcattagtaataaaggtattaaggatactcttagtagtttttttagcaaagtccatcctccatttctatactctacttaatcatgtatcaactttgattctagttcttatatttaccctagcatcactttcctgtcccacatccttataattttcaattctactatttttttgtttcggaagaattagcacctgttctttaatcgaaaaaaacactttgcgaactgcaaagcgttctcgtttataatttgctgtccagtaacaaattaacgtactgataactagctaactttgtgaactttcttaagacctggtttgacaaggttttatttaagtaattttaaaacagctttatattaattcttaacacattctatgctgcttctttatttcaaaaaattgtatcggtttcttaaataaggggaatcaactcaaatgattaagttgccttctaaaattaaccttcgtatgtatgattttatacaatagatgagtatagttggcgactataaaaaatgctaactttcctaaaaaacatattatcactcattttttgtgtttagtagccattcaatttaatcctcaatcatcctcatgaattgactctatataagtataaaattgatgtttcaaatagctaagaggcgtattttgataacgttcagcatcacaagatttcatttcaccaaatattaaatcctctactgaagtataaatgttatttaagtcttcatccaagatattagataaatgtttctcataaagttttgaatattcttctctttttttagcgataagagtcaattcatccttatgaattttatacgcctctcgaagacctaatatctctatatcgttttcaacctcttgatctgaagataataaattaggtgcccaaaagccttcatttaattcaaattcaaactcaaaatttgaattaacattagtttttctgaaaggcgaaacatgcaaatcatctgtgcgctttttggtattacagattgcacaacatgggattagattatataaacatatagcgaagaacggatacttactccttggaaaaaaatgatctaagtgtcctccaggaaatttacaattcctttcatttatatagtccctattacagtatggacaaacgtgcactttccctaatatttccaaattcagttttacattattctggtttttttttatcctactatcatagtaattatgcatgcggctgaaaatcttcacctcttgctttaatgatttgatttcttgttctaatttttcattcttttctttttcatttattttgtcttgaagttttttccaggctccccacattcccgaattattcttttccaaatctctaacacaattttgaagacgttcatgacttgctaatatcaagtctctaaacgtagaaaatttattgttactactcaaagactcattaagcttcacaagtaaattttcttgaaatttgagatcgatatttattctttccaagtacaaggcttcaaacttaggactgtacttcttcaaaaaaactgtcatgattcttcattcccttccaactctgatagcttttttttataaaaacgaatcaattcgtctttatcagtattttgaaactcttccaatttatgtaagaagtgatttctcacaataggttcgccaattagcttgattgcttttttaaactgatcagtactattttcttcgatattcacaaaatatttttctaaaaatttaggaatattatcgtgaattttaccaggactgaaaactttagcaatatctttaatatagttagtcgagaattctccttgtacattatcaagtatgaatgaagaattaaacaaatcataaatattctgagcaaatgtttctttgttttcatcattcggactcaaataaataatatcacttttagggacgtccgatagaagaataggagagtgagttgtaactattaactgagcattttttgaaaaaagatctgaaagtaatggtcgaattttactaatccataatctttgccactcaggatgaagacctaaatcgacctcgtcaattaataagattgtgtctttctcattacctagatcaactgttatacttgaggtcctacctaataaatttaataaagagatctctcctgaactcaatcccttccatctcagctcaaacaaacgataaatttcatgaataacatcttcagtatcactatgaaaattattaataagatctttcaataattgtctcttttcgggatcttcaaaattaaaagagacctcactattaaaaagtccattttgtaaaaaataagaatactcttcagcgattagctcccccaaaatcttattaccttcatttattacttcccctagctcttcaaaagaaaacttaaactgtttttctccttctttcttaaaaattacgttcgtaatctctttataattttcctcccctaagaaatccaatattataactattgcattatacataaatgccttttcaatggcatttgtttgtccaacttgtttcaaaagttggctaatatatttcctttgtctagagttaaagtagttcttaccataactattaatcgtttgaccaaatgatgataggccaaaaacaactgattttcctgcacttctaataactctttgttttctttcctcaaactctgaataaaataaatcctcaaaatgatcgattgaatagttaatctgctttatcatatctatgcgatgtaattgatctaatgtcatcgattgcagatatgcactcgtagaaatatcattgtcgttccttattttactttcacatacttcaatggaagacgaatatttgattacctgagtattctctagtatttcagatttttttatatgttttacttttttggtaaatgccccattaacactaccaaatgtaacataatcatcatctcctctcctgaaaatataggtatcttttgtcttgttatttaaagagaagatctcatttaatagaaaggttttgccttcattgtttttacctactatacacttaaatgatttaaaaccactacttttcatagttaaataatttttacgaaaagtaaatttaccatctacctctttttctaaagttatcatagaagaaaaattcagaattgttccattattcttgattatcgctatcaattccatcataaacctccaaaatacactcagcatgactttttattacatatctttcaaactcttcttcgactttatcaatagaaaaatcagaaaacatagcaccttgaatattttccgttgtagttctacctatgatttgactaaaaccatatttggggtaattatcaacttttttcgttccctcataaagcgcctgaatatgttttttctgtcccaaatttcttccgaattcattagtctcaattaatccttctagtgtttttttccctttgacgttgttgttgggatctggaataaaaatcttaataacatccttcaataatatcttattttcccacttacgtccggcccataaatccaatcggttatatgggtcccctataactttatatatcaccgccttataaattgcggcatttctatatgttataaatactggcattccttcttttagttttttgtttcttaacctattattatcttttgaatatccccaaacagaataagatgcctgatcaccctcaatatcatagattatatttttataattagcgattaaatctctatctttatgtgtataaaatggtgctgaatataaataactaactatcttttttgtaggtatcgggttctcaatagaatttgtcaaataatttgcaataccatttcctcccggtaaaattaatgctttatcttcgtaatttttcatagatctccttttgactcaactttcatttcaccttgttaattttacaagcttataactacagaaattacttacaattagtccttcccaacccgaaaactaattcatactcaccgcaatatcacactaaaattaaacagaataaataaatcttaaaaagcacaacatgctgctgtgctaatccagtctggtatcagttattaaagtcatgatatatagatttttctctctacaacttgaagaaaagtactaatttgaaatactcttacgtgaatctaataattttcacattcaatagagaatcagtgttaagcatagttagtattattatcagtatgactccacatctacataaatccattaatggtaaatacaataactttcccttactcagctacacagcaactataatttatatagtactctctttaccaaaaaaaatctaacttttgggttacaatcaaactgcaaagtattttcgtttatatttgctttcctgtgataaattaatatttactaaactgtgagttttcttaagacctgatttgatagaaaagtatttaagcatatctcatacatcgtactttaacaactttgaacacactcctcaaatttaaataatttgaaaaaattttatgttgagcagaaatagtatctttattttttactacctataagatcagatctccaactttctaatattgtttgatcaaaattattgatttggtatttaagatgtatcgaattaagactatataaaagaaccaatacaaatctagctgtttgaatcttttgtttaatggttagcaagacttctctatctctttcagttattccataaattttatctgaatagtggctttctccattcaaaagcaatctatacatatgagattttagaagatctctctcctctttatcatcaatcgattcacttaataatacttcgttcgaacttaactctgagatccctttttgataattaaaggtggaaaaagcttccaatactcgtctcataacgttaccaatatacggagaaaaatcctttgcaaaatcacattcctcatcctcaatacaagcaaattcatatatttttgtaagttgcttagaatagaagttttcctctttctctgctgtttctataccagtcatagcattcaattgttttaatttaatctgataatctttaaaaactctcttcccatcagtatctaagatatcttcaaatattttataacaattataatagacatcactatcatgagtcagtatcagtatcttactattctcattaccaatagcaattttctcaatttctcctcgaagcaaactatatattcctaatttaatctcatggtcaaaactagataccggatcatcaagaactaataaaagtggtaaattatattgatcatcaacattttgattttgattgactatagaaaaaaagtaacataaaccaattgcatttctctctccggtagataagctacttaaatgtgtccttttccctcgagataagacatagtaaaatccgtcttcctgttctaattttaatcgctcagattcataaaacactctacccaattgtttattaatattgttaagagctaaagtagtattttttaccgactgctcatcttttacaattttctcatttaaatcttttatcaatttctcagttttatttgctttttctctattcttaactacttctttaaaaaaattctctgtttctttataagctaatttatcattaagttcatttgcttctataatattatcatcaagtttattaaatcttatattatactcatcacaagcgctattatatttagataatgatacatcataagcatttttagctttgaaaagcggttcgctactaaaattacagaccatatatacattactcttcttagtctttaattcattaatcattagattaagctttgatttcaaatcttctattgattcactcaaactcctccttacatcttcctctattcttttatctagatctgcagaatctaattctgaaattttaagctcaaatattttaacaacttgatctatacattcaatatgtttagatatctcattattttgcaattgcttctccaaaactgattttaattgagctagagtacctcgtttatattcctcgttaatttcctgaaaacatgttggacaattatttgaatttccttttaatatgttttctgttttttctatactactgtcagcattatttccaagtatttcaataatctgattttctctctctgttagttctatcatgctaaccggttcagatatagtttttaatttttcttttatttcattgatcgagagctctactcctggatgttttttaatctttttttccttattagcggattctatttcttttaacaggttacgaagatcttcttctaaatttatcactgatatagacgaaacagaactagaaattctatttattaaacttgtgttgaagtaagggtttttattgtttaatttattataattactcttccaccttgattctttagagcctacaatactttcttttatagcattttcagcatttgaaattgtatcgttatactgaatcaatttagactctaatctttttacttcacttttgtttgatgctatcttcgacattaaatctttttgatcatcaataagaacaatcgcttcaaatttttcattttctgtaaaagttactttttctctttgaaactcttcattgtatacaaatatagtctctttatcactatcagtaatatttagcgtgttagttcctctcattctttcatcaaaaagagtaatatcctcacttatatctcttaaactagaaatagattttgaaatagtactttttcctgccccatttcttccaaatataatcatacttctgagtatttcagtatccggattggtttccttcttcaaccaatttagttctattttcctataaggtaagtagtctttttcaatagttatctttgtaaattcttgcatctgttactccttcataatccaattatctcaaatcttctagttcctgttactgaaaataaagttctatgtatcacaaaataaggtattagctacatttttaaactttctgttatgattatactaaagattttctacatatccaaaaagaataaggaaacagtttaaaaatagtgatcattgaagtattttcctgtatatttgcaacggtatttgttgcttttgcatttattaaacttggaagaaacatcaaaatagatgataatcagattatctaaacagtcatatatgactattcgtaaggaaaagaagcttgtaaatcagaatttagaaattttgatataataaagctataaaaagtaaaggaataattggtatgaaattaattacagctcacactaattatataatcagtcgtgtctattttgaatctcaaagataagtttttcccattgcaactgaaagagaggtatttacatgagccaaaaattagagacaaagattcaacaagccctgcgagaggtggtggaaagctttgatgagcaatatgttgttgaaggactattaaaaaaagatgctattataacagatttagataattatcaacctaagttggttgaaaaaattttaacaaataaaattctaaatgaagcgtttactgaagatattgctggtgcgacaattttgaaaatcaacgatattattcagatgcttgaagttgatgaatattggtcaaactcttacacacgttacaccaacaaaattgggctatcaacgaataatcgatatttggatgaagtaacagatgttgtgctaaatttcccatacaaagataccatcttaaaagctggtatgactaaagatgatgtatcgagagaagacgctgaagaatcatttttaaatgagatagttgctagggaggaaattgatgtccttctagacaaaaagatcttaaaaaatgttaaaaaatgtagtcaagacggtttttttgaaacatcagaaattaaggaaacagataatctcatcataaaaggaaataatcttctatcactctatagtttaaaagaacgtcttaagaaattgaataagggcgttaaattaatttatattgatccaccatattatttcattaaaaaaaagaaagaggatacattcccatataattcaaactttaaattgtctacgtggctgacttttatgacgaatcgcttggagattgccaaagatttattatctgacgatggagctatttttgttcaaataagtgacgatggagtcggagaacttcatgttttgctaaaagaagttttcaagaaagagaattttatcaacaagattaccgtaaaaacaaagtctccttcaggatttgctagtgtcaatccaggtgtattcgaaacagcagagtatattttatcttttgcaaaagataaaacaaaatggaagtataatactcagtttgtacgttctaactatgatccaaattataaattttacattctcaataaaaatgaagactattcaaattgggaaattgagaacattggcgaacatgttgccaagaaacaaggatttaaaaataaaaaagaagctaaacaaaatctaggagaaataatttttgataatctagtcgcagattttgctatagaaaatgctgattctgtctaccgcgagactccaattaataacaatgcaagtagtgttttagttgatttgagagacaaatcaaaatacgacgcagcatcaatttttttccaaactagggaaaataattacgatgtttatgtaaaaaatggtcaagaactaactttctattctaaaaagataagagaaattgatggagaacgcgtaccaagtattcaattatctaatatttggacggatatcccttatgagggaattgctaaagaaggtgatgtgaaactaaaaggcgggaagaagcctgagaaactacttcggcgtattattgagttggcaacagatgagggtgatatggttcttgattatcatcttggttctggaacaactgcagcagtagctcataaattaaataggcaatatattggctttgaacagttggattatggtgaaaatgatagtgttgctagattagaaagagtcgttcagggtgaaaacagtggaatttctaaaacggttaaatggtctggcggtggttcatttatttatgctgagttaatgaacaaaaattcaacctttattgatgctgtccttaactctaaaaattctgatgaactgaaaaatatctttgatgatatgaaatttacacttgattttgattttagagttgatttactagaagtatcaaaatccatatggaatgaagattttgatactcagaagaaaattctagtaaaaattattgataaaaatcagttgtactataactattctgaaattgaagacacgatgattcaatcacaactttccgaatcagacattgctttcaataagagcttttatggagagtagtaatgcctaaaaacacaaagaaaaagaagctaacgtttgaactttttgatgagttgagacagttagatatggatattttgaacgagcaacatggttgggaattaccagactatattatagaaaatctcaaacatgaaccgcgttattatcagagcgaggctattcgctatcttcactacactcaaacatcaaatactttcaagtttcgaaagccaaaacaacttatgttcaatatggcaactggatctgggaagactgatttgatggctggtttaatactctatctctacaaagaaaaagggtatcaaaattttttgttcactgtaaatacgaatggagttctgagtaagacaattgataaccttacaaatgctcaatctactaagtttcttttcaattccaacctagaaattgacggtgaacatatcgttattaaccagatttcaggaagatttcccgaatttccacttccaaattctatcaacatcaaattcgtttcaattcaaacattaacaaatgaattatttactcaagcagaaaatatcatgtcgttgaatgattatcaaaaaacaaaaatgatcattcttgctgatgaagctcaccattactctgcttctactaagaagaaaacaaaaatcgaattagaaaaagcttcgtgggaaaagactctattggaacttcttgacgcacataatgacaacttattgctagaatttacagcaactcttgactttgatgatgaaaccatttatcaaaaatatagagataagattgtttatcgttatacattggatgcatatattaaagataggtattcaaaaaatgtcagacgaatccaaacaggcaattccaatgaagataatatgctaagtaccgttttgttgagcgaatatagaagacgatacgcattggaaaaattgggatttgaaataaaaccagttattcttttcaaatcacacaagattgatgcatcacacgaagcaaataatctattcaataagatgattgaaaatctgaccgtggaaagtttaagtgagttccttacttcgcaattgagaagtatatcagaagagcaaagtcataccctacagctagcttatcagtattatgttgaaaaggatgatctttcaactgttgttcgagaaatcaagcgtggtttttcaccaactaggattttaaatgcaaacgattcagataggggggcaaagggtttgttagaaactggtcagtatcaagccctcaattcgctagagtctccaagtaatctctatcgtgtagtattcgcggtggcaaaattaacagaaggttgggatgtcctcaatctatatgacattgttcgtattagcaacctgggtaaaattaatgataaaagagatgctaaatcaaccaattcagaagctcagttgattggacgtggggctcgatacaatcctttccccttaaatcaagagatttcttatcaaagacgatttgacgaagccgatgaaacagcaagtcttttgctggaaacattacactaccatactcttaatgagccacaatacatcaagaatcttatgacatcacttgataagatgaatcttgctactgggacagatgaaaagaatcctctgattgaaatcagactgaaaccttcttttaagaaaaccaaagtttttaaaacaggtaaactttactataatgaaaccgaggagattcctgatagtcactatgtgaattttcgtgcatatggcattgaaatttctagtatagctaatataacttatttaaaatccacttatgaaacagcctacctttcagctgaagcgatagagtcaaaaacggtccaattaaggggaattgatattcgttattttaaaaaatcaattagtcgctctaactttttccgatttgaaaatttgaaaaaatatcttccaaatctaaaatctatggaagatttttggggtgaaaattggctagatttgcgaaatcttaaactatctgttacaacagaaaaagataccattgtagaagaattttcagctatggaaaagttaaaaattgttgataacttttttaacctactggctgctcaaataaaagcaggttatcgcaaagcaaggggaacaaatcgctttgttggatatcctatagaagaatatctcgttgattatcgtaaacgaatacctaattatgatacagccaaacagagtggatcttttatcgaacaaaaagtatctaatattgcatttgaaaaatttgacttttttgtatatcaatcagctgtaatcaatagaaatgaagaaaatctagttgatgctattgccaaccatattgatgaactaagagaaaaatatggagatgtgttcctcattcggatggacgaaaacatgctaaaaggaacagataaagttgaacgattgaaattacatcaatttgaagagaatccacgggaaatcaatttttcaggatttcaaccagattttatcttacttcttcaaaatgaagattattaccttcaaatttttattgaacctaaaggtgagcaattagtagaaaaagataaatggaaagaagaacttctttcctacatcactgaacatcaagaagatttaattttcgaggatgaagtagatgatgttattatcaaagggctcaaattctacaacaaagagaatagcgagcaaacgttcaatcaattagcacaaattgctcttgaaaggccacaatttggcggaaatattaggttgaacttgttctaaaaaaaagacgattcccattttggaagtcgtcttttttaatattaatatcttttcaaatactatatcttgtgattggtataaactggtatatcgttccctaaataaaaaaatagttaattgtgagaatttccctgcaagaaatactaatatttaatccttttaatagtaactatttttaacttcaaatatcctatttaaattctataggaaagaagctgtcaacaataatacctactactcgtggatctttattataggagataaagatatcctcatattttggattaatcgaaactaaacgtaaaccatcttcttcacggtagactcgtttaatataggtttggttattgcatactacagcatagactgctccatcataatcaaaacctgtctcacggataagagctactgaaccattatggtatctgggttccatagaatctacagatacccatgaagcaaaatcatgagctaattcttcattgaaataaacagtgtcatagtttcgatcatcataaactgatgccccaataccagcggacattttttcgtatacatggtactcatagagattttctgaaactgatattacttgttgtgttttctctttttgcaccaagtcacgagcatattctactacttgatttttacctttattcgacaatgtatcatacaaacgaacaatttcaatctctgtaaaatatccttttggtactttgagtaactgttctagtcggtttactttttctttagatggttcctttactccacgttcccaagctgaataggcttgatagctaatgcctaattgatcagaaatatctttttgagtcatttttagctcttttctacgagcttttagtttttctggctgatacatagttcacctcacattaacaataattgtaattctgcttttttccttgcctctttatctgaaaatttttctttatcccaaacatacgcaatcgactttcctttattataaataagccatgtttttaagttaatattttcgtccttgattgctttccagttatcttgattcaataaatctggatattcttgactagttgtaaatcctagtttactcactctctgcttaacctgattaataagggaaggttgaaactgatgaaattcctctataatctgttctctaatatcatgaaacaaacaataaatagaagcattattcccttcaatatatgcctcaactgcttgtttaatttcattatctttaccagaataatattcccgtagaaagtctaaaagacgaaaaaataaagcctgttttgaaactccgagactattttgtatttgatggaaggtctcgcaactatagtatatttttgataaaagaacaatatctggcatcaataccacagccgaaaagatattcgcctctcgctctaagatgtcctcttgattatctacagactccgcaaaataagtcccatcatgatccaaaataaagtgtcctaactcatgacataaagtaaaatttcgctttactttaggattatctcgttcataggaaaaacttgtccctaactcatcaaccactgttaaaccttcaattttatgatttgaaaaatggtgaggaatcacttggatattattttcttgaatacagaatcgaaaataataatcaaaatgatagttcaataaagaaacatcttgatcctttataaactgatataatgcttgttttgttgtactacttactcttgcatacaattcatccaaagaatggtacctccttaagtatgaatgacaaaactaaactaatttggtttagtttattatataaaaaaagtagattattatctactcttaaaagccgtttcggtaatctattttatatccttcttggaaatttggaataaaaacaaaaaacatttcttctaactctttcgtatttgtgtctattttaatgcctcttaatctattacctattggaactctgtctttttgagaacagaagacagcttcaacttcatagtagaaatattgttcttctgttaaagagtcaatttctttaattactctatcttcaaaatatttttgtccacaatctgtgtcggagtgaatattggctcttttagtttgggcaaatatattattcatatttaaagtatcaacaaacttaccatttatccctattctctgcaagattcttctacctaataaatgtccataatgaatccaagaaaactcacctttagattttctttttaaattttttgagggtatctctttctgagtattacaacgaatatagaattcaggagttgataaattacaatgttttgaaactagaatcccccatctaatcgtcctctttatatcgtttcgactttttccacttaaactagatttacctattgaagaatagatagtagaattttcctctttttttatacaagaagatattgtatcaacatctgttagtgatattaaggtatttagcttatcagaatagaggtcgaagtaacatccttccttattaaactcatttgaacacacatctagaagtgtattgaatcttaaattagtatatttataaactttaccaccagtaatcccaagtattttaaatatctttgatttttccattgacattttgctttacatattaaaaccaaaataatttggttgagttgaatatataagaaagtagataattgtccactcaattttctacttaaaacacaaatatatatttattctaattattctttttccgtaaactactcaagaatttactaacggaagctactcccgccaagaaacccgtagcatacgtaccatattttattcccttatctctataatctctttcatgctcaccacagaacaacgctttaggtgcatgaacttctttcttgcacttagggaccatacagattttttctttcttatttgccatcttcttcctcctctattagtaaattttccgtactattaatcagtctatctacattattgcaaatgccctgaattaattgagtaaaatttttactatctccctttgaaaaattatcaattttccatgctaaactcttcccttcatatttcggatccaacaaagtttgttcaataaattcttgataattacttaatacagccatcactgactctttttcttctaacattgtataagcaatgacattcaattgcatcgctgacgataaataactaattgattgctgaagcaaattaccaatcctatttgcatctttttttttaatcttataatttgtaaaatcaatactgtcagtataaattgacaacatcaattttgaaatagtgctattagtttcttttattgctgaaagtaataaatctcttttcaatagctcatcttttgtagctaaagcctcgataattaattgtcttgaactaaaaaatccagaaaatctatcattgtattgaccttgttcaactctgataactagttcactcagtgattcaatttgttctgagataaacgctagctggccttgaattgctgaaagttctgggagattaccaagatcttgaacaactcttttttctagtgttacactacttttaatttttccagacaccgtatctttaagaaccgcataagtttcacccgtttttttccggataccgtaactccactcaccagtcctaagtttttcctttgcaacttttgataatttagcaacatattcctcgttactttctttattaacgagctcctttattagcttagattcagaaatatgagagaatagattactctttattttatcaccaatcatagtggaaacttcattttgcaatggaactaatgaataggttcggaagtcatagttgtataattcttttctcctaacatcaacctcgaattgtgctgaggtaggtatttcaatctcaaaattgtccattatttatactctccctttgtggttaatcacttttaaaacttgttctatggggacaatcaatagtttgtttaatcattattatacgtagttagttcatccaaacttatctcaaaaaattttgctaatctcactgcatgcttcaaagtcatacacatcatatcttgctcccatcgaagaatggttcttttatttacacctaattccttagctagttgaacttttgttaaaccacgttcaagcctcaattcttttattttcatagaaatcacattcctttatcaaaagccttcttccgttcttccataaactcaatcaactctttcttgaagatctctttttcttcatcagtcaatccttttgaattcatacgaaaaagtaattcaatattgtccaattcatctgttttctcctctgagttgccgactaaatagtctacagatacattcaaaatctgtgcaatcttcaccagattttcttgtgttggcttttttactccacgttcccatgaagcataagctggttgcgaaattcctagtttttctgccacatctacttgggttaatcctgcttgtttcctaaggtcttttaagcgttccgaaaattccattttaaacctctaaaaattatttttcatttttttaaattatctcttgacaaatataactaacggttatataatccaaatatagctgatagttatatttattttaaaaataataatgcctaacattcagcatcacgatcattgacaattaaataaaaaatgcgtctgacaaccagaggactgaccatcaaactacactaaacttcgtacctttattgtaattgttttgataagtaaagtcaagttcgttttatggttgaagtgaagataaaaacaagtattttgtgggcttccacgcatttcggaccattagcacttttgccgaatagtaaagtgaactggttgcgcaagattgcgtaagagaatcttatgggtatgattacgactccccaattagattggccgggaaaacgatggtaattaacgcaaagcaccttgctaaacgttgccaccgtggaaagaggtttctttccaaccaaataacttttctttactgctgtctatcttttgagaaagacttactctcaagctactaagtctttcttttatcttagtagcttttttacgcttacaataaaggagaaattatgactaacttttttcgcattccaatgtaaacgcctctatgataactatgaattcacctatggcatgtttagctactcgcctaaactacaagctaagctctacacacaagctcttcttgacctcgatcatttagtccaagaagctcgtagaaatagctatcctagcggtgatattcagttctatagtcgacagtttaaacgtaaactttttacccactattactcaagagtgaagcaattggcttaactctttttcttttgctcaaattcagaaaggagaatcctatgattccagaaacacttgctatgaaaccagactttattggccctgcctactacgaaaaattagggaacgcccctcgctttatctttgggaaagaaggtaaataccaacgccatatccttaatagtgaaaaacatggagctttccacattattacccctgcttctacaacggtcttcccagaagatgctctcgtagaagccgtcaatcctatttttctctcagatacagctctaaacggcaactcagttgccccagccctcaatgtctttgcggaaaaattggtcctaaaaaaataagaaagtaaaggagaaatacatatggctaaaatcggattaaactacggagaaaaactacaaattgcggacaagacctatcgtgtcattacggatggtctaaacgtgcctgaagtccttggaaaactatctttccgtggcattgaagggcctgatatcatctttgaagaagaccgcacccaacgaaatcctgatggctcattcgtccaagtcaacacaggggaaatccgtgggattgttgtggcgattcactcttccgtccagcatgagaccctctttttcacgattgctgatatggcacagtctgaaattgaagatctaggcattaaataccgagaagaagttgaactagaagatattgtgatcacccacacgcacgttaaccgtaatgatatttacaagctctttgcttctaaaatcaagaaaaagaatggaggggcacctcttaaggaaaacaaacctctagacaacaaaaaggataattaggaggtgatgcactatgaagctctttacctatcgtgggataagagttagggccttttatcgtcatattcggggaatcacctggtttatctggtggttcccttctttgttagccattggaaattactgctatgtcaacctagaagaattgagagaccatcccttgccattaggctattttattgggggtattcttttcgcttcttgcttggtggcttacctactgaatcgcatgtgttacgagaaaatcgtcttcttccagaagctcaatagcctacggattttgtcacgtttcctgatcgaaaacaacctctatttgattaaaaatatcaggcgtgaaaacaaaacgattgaaaagattgtccttcctcaggtctacttaaaacagtctcgctacaagattgaagttcattttatcctggaaggcaataaatttcaggaccgttttctcaatcttggatctacccttgaagtcatgtttaatggggactttcgtaataaaacctttgataaacggtttatcacctatgacattgccatcaaccgcattgatagtcgtatcaccattaatgaggtcgaggtaaagggctctaaactccagctcatgaaagacgtcacttgggactatattgaagaacctcacctgctcattggtgggggaactggaggcggtaaatccgttgtccttatgaccattatctatgcactcattaagattggctttgtggatatctgtgacccaaagaactctgacctagctggactcaaaaagattccagtctttcatggtcgtgtctatacaagtaaagaagatatcatccagtgttttaaagaaaatgtggtcttcatggaaaaacgctatgaactcatgtctaactcacccaaatttcaagctggtaagaactttacacactacggcatgacacccaaattcgtcctcgtagacgagtgggcagcccttatggctaagattgaccgtgactatagcctccaatcggaactcatggaatacctctctcagctcgttctagaagggcgtcaagctggcgtctttatcatctttgccatgcaaaggcctgacggtgaattcattaaaacagctcttcgagataactttatgaaacgcctctccgttggccacttggaatcaacgggttacgacatgatgtttggagatgccaataaaaccaaagagtttaaaaaactcgatgaaatcaatggcgtcaaagttaaaggacgaggctatattgctaataacggagacttggctggcgaattcttctccccttacgtgccacttgaccaaggcttctctttctatgatgcctacgcaaaaatccctattatggaatatagtggtgaagaatttacagtctttggagaaagccttttacaaccaaaaacgattgaaccaatagaggaggaagaagctctaaacactgaaactaatcaacgtccgctcaaggaatttgcggaggaacaggacctcaaaatggcgacgcttcgaaagattatctatctcttgcaagaacaagggattgtttttgaacggacggaatccgccattctagtcgatccttttcaagaagaactccttcttgaaagtcttatccactttgaggagggaggacgcaaatcttatcccaaagctgttgaagcgacgcttagtcatcatgggctaggacaagggcaagggcaagcctgaccacaggtcaggcgcagaccgtagcccgaagttcctaggccatgatgagacttcaacccccgatttctaataggggggttacatttggccaaagtgccacgtccacccctcctcattccttgtgggagttgggatttcaagatttagaaagtgtgtcactttgggccaaaaagtgtgtcacttagtcaaaaggaggtgttcccatgaatgactaaaatgagtccctttcagatcaaaaacttcagaaaacaaacaggcctcagccaaaaagcttttgcacaagccgttaacttaccgataagaacttaccgctcctatgaatcaggggaaagaggtctcaccattgacaagttccgagaactcaaagaaaagctcggttattatcaagagtgtcacaaaaacaatcttagggctcacatcgactatttgcgacttaccttccctagtatacgggatttagaagctttctgtgagaactttcttttttgtcacttaagcgaatttactgaccaagaaacacggcttatgaattatacccacttgtggcaaaggggaaacatttggattttcgatttctttgataagtctgcgaccaataactaccaaacgtgtcttcaactctctggtcaaggctgtcgggagatggaactcctcttagaacacaaggggatttcctggcaaacctttcttcaaaatattctctatgcctacgaagatgtcagggtaaaacgccttgatatcgccctagacgagatctataaaggctatggacacgaggatgaacatatccagattccaaagctcattgataagctctatgccaaagaaattgtcctagataccattcgaaaatggaacatcacaggtgggggttccttcaccgataacgacgatatggaagccaatcacggtctgtccctctactttgggagccgtcaaagtcagctctacttcaacttttatgaaaaacgatacgaaatcgcccgtatggaaaatatctccttggaagagtccttggagatttttggtatctggaaccgctacgagctacgcttttcagaccagaaagcccaaggggttgtagaggaatacatcaacggtgtggacctcggagaaatcgcaagaggtatcgtaaacaaggaaatccaagtctatgatggtgtcacccgttttggagcctataagcctgatgaaaaatggcaaaggctctttggaggagttgaacccctaaaactctcaaccagtccacaaccctacagtatcgaacggaccattcgctggttgacctatcaagtcgcaaactctcttgcactcgtttctgaagcagacaaaatcatgcaaacagaatacatgaagatgattcaaaatagcggtgaaattactgatcgtggggaggctatcttaagactcctcaaaaccaacaaacactatgaacactagaaaggaaatcccttatggaatacaaagtcgaaatcaattcactaaacaactttaaagcctggtctggtggcctgagtaccttaaacactgtccgtgaacgtggtgggatagataccctaaccactatctgtgaagacctcttttctggcaatacccctaccgacactcaaatcaatgattggctctggtttgatacagactttatttatcaagcacttggctacgaggacctcctagagggctaaggccatgctcaagaaaatctatcaagcagacttcctccttcttcctgatcaggagttctggaacatgtatatcctccttagaaaaggcaaggacttctactatgaatgtgctggaagatgcaccgaaaagccaccagatgataggggcttctacgactatgaacatgcctgtttcaccctagacggtcaagttctgagtctcaataaacggatgcgtccctctctcattgcctatattcaacagaccatcaaaaacaataacgaaacctttagaaaggaaattgatatggccactaaaacgatttttgaaaccaaagttggacaagttaccaacgaacttggagaattgctcaaaaagaaagaccacaaacaggcttggaccaaggctggagaactcaacgctctgctcaaaaaagaagaagccaaggacctaaaacctgagttagtcgaacaactccacaatgagttacgaggctactactacattaacagtgagattgaaaaagccaataagcgactctatgccaaaggttctaaactcattgaactcgctagtctctagaaggaggacctatgataaaagcgaaacgatacttactaaaagcaagggaatacctctcaaactttaaaaaggtggagaaaaaaggtggcccaccaaagctaaaaatcactacgaaaaagaccgtcaatctagctgttatcggaggaattgctttcctcctttttgttggtcttactggcgccatccgtgccatcactctctcaaataaagtgggcaaactacaagctcaagtcgaagcaactcaaaaacaaaaagcacaacctatggacgctaatcgtaagtatgactacaagctccagtattacctcaatgactatgtctacgcctacttcaccctcccacaagaaggggataaacaacaagcacaagtcgaacaccttaacagcttttataacttcgttccagacgtcaaagcacaaggtcaagtacgtaacccaagtaccctgctctactcacaattagtcacggtagaaggtaagatagccacctacaaggtcaaatacaaagaaataatccaacatgacaaagacaccgaggaaaaagaactggtaacgggatttaatattccctttgatgaaaaagaagggaaatactacgtttctggactcccttggttctcagccactgactcttcacaagctggacactttagcgaagacgatcaactcctactcacagctaacgaccacgtctcagataaccaacacaagaaggttgaaaagttcctcaaggtgttctttaccaactataccactaaccaagacaacctcaaccttattgccaagaacgttgctattgtagccaataccacctttaaaacgattgactatacctatcttaagaaagataaggctggtctcatagcctatgtccaagcaacctttgaggtgggaggaacaacacactctgaaaacttcacctttaccctctcagaaaaagacaaaagctactatgtcacaaaactagaacacaccattccacttaactacgcaaacgataaagattaggagaactctatgaatacagacaatctacgtaccttcctccaaggcgatgggatttggattctcaccgctatcgctgttttgttggctattaaagcttggcgaaacagttcttggcttcaactcttctcagtcgttggcttctatgccgtcattgtctcaatcgcaaaaggacaagatatcctaaaagtggtcggctggttcctacgactctttggtattgattcaggactttaagcatggctgacgaaagactctatgactacagtaagggcttaaacgccccctattggatccaggaaatcaagacaaaaaaagggactcgcctctggtactttgcgacaccaatgcaattgtcctttttcattgtctttacctctgtttttgtagctatgttgctctttggaggattcatcctagttcctctcgcaaaattaacacactctatctcactactgctctactggtacctcccctataaactcgctaaattctacaccgaatacgaaccacacggtaagaaaatgcacgttttcattggggactacctgatttacttatgggatttcaagctcaataaaaaagcgatctaccatgaagaccgaatagagcctgtagaagaaattgtctttgaaaaaacaaatctatagaaaaggaggtcttatgagtattaccttatcctatcctattagggaaacccatgaaaatctagccctcaaaaaagatcgaacggtagtggcttattaccgtattcccaatactcccatcaccattacagatgaagagaaaaagggtaaacacaaaatcacggttgctcagatgatgaagaagctccagaaaaacaagtcctttgatatctcactcattcccaaagactatctcttagaagagaaaatgagggatttttcagaagcattggcagatgatagccgtgaactgggagaagaacttcttctttacacggttgaccgtctcacggatgaaatggaaattccttatcagtttgactgggtcgtgggagtgaccttacgcaaacaaaatcacggggcaacggtgaaagacttggcctatgagagttttaacgagttctcagaaaaaatcgcaaaaggtcttggctacgaatacgcattgagtcccacctggtatgacgattacagaagtgacgaattcactattttccaagctttttccgtcctacgtgctaaacgtctgaccaatgaagaactcttctactaccagcggatgcaatacctccgctatattccccattacaagaaggaggtccttgctaatcgctcccaatttaatatcacagacaccctgattaaagtcctaaaaggaggcttcctcaagctcgaaagtccttatggggcttcctttgtgaccattcttcctgttggaaaatttcctgtgcaattcaacggctttcacttaggcgaattcgtccaacgcttgaactttcctgtagaactacgtatcaaggcagaattcattgataccaacaaaatcaaggggagaatggggcgttctaatacccgttatcgaaacatcatggaagaagctgaaaacacagacaccgtccaacaagatgaaatcatcatgggttctatctccctaaaagacctgatgaagaaagtcggaaacaaggaagatatcatcgaatatggagcctatctcattgtttcggcttctagtgtgaatcagcttcgtcaaagacgacaagtagttctcaactattttgatgatatgggcgttgaaatcagtgaagcctctcaagatggaccatacctctttcaagccttactctatggtgaaaacctccaaaagaaaactcgcacatggacacatatggtcacagctcgtggattttcagaacttatgccctttaccaatacatcctcaggaaaccgtatcggttggtatatcggacgagtggacaactggacgggccgctgggacactatcgctaaagccattgactcctctaaaaatatcgtcctctacaatgccacagtcggtaataaagaagatatcgctggaaagattaccaagaacccacatatcattattacgggtgcgacaggacaaggaaaatctttcctcgctcagattatctttttaagtgtggctttacaaaatgtcaaaaccctctatattgaccccaaacgagaactcagaaatcactatcaagaggtaatcaactctcctgaatttgcacgacgctacccagaacgcaaaaaacagattgaaaactttaacttcgtaacactcgatagctcactgccatcaaatcacggagtccttgatcccattgtagtccttgataaggaacaagccgtagaggtcgcaaagaacatgctcgagtttctactacaagctgtcgatgacgtgacgatggaccagaaaacagccatcacagaagccatcaatgctatcgtagaacgtcgagtagctggtgaaaacgttggctttaaacatgtcctggaggccctaagaaaggcttcctcttctgaaattgcctcagttggacgctacctgacgtccattgtgacaaactccatcttggaactcgctttctcagatggcacaactccaggacttaactatgagtcccgagttactatcctagaagtcaataacctcaagctcccaaaggatgactccacaaagatttcagaccacgaacgaaactctattgccctcatgtttgcgcttggagccttttgtacccactttggcgaacgcaatgaaaatgaagataccattgagttctttgacgaagcttggattttgatgaaatccgcagaaggaaaggccgtaatcaaaaatatgagacgtattggacgctctaaaaacaataccctagcactgattacacaatctgtgcatgatgcagaaaatgacgatgacacgactggatttgggaccatctttgccttctatgaaaaatctgaacgtgaagatatcctcagacacgtcaatctcgaagtcactgaaagtaacctcgaatggattgataatatgatttctggtcagtgcctttactacgatgtctacggtaatctcaatatgatttccgtccacaatctctttgaagatattgatatgcttctaaaacctatgaaagcaacagtctcttcaagtcttgaaaacaaatacgctagttaggaggtgaaccgatgcaagaagcttttgccaagctaaagggagtggatatcttctccctaaagtcctacatggaaccaaccaactttggctcctttaatggagcctgggttctaattaatgaactcttcgttaacctcttctttttcattctcaatgccgtcgttggcttcttttccctccttattcgcatcttagaaaagattgatctctataccacctataaaacctatgtttttcatggggcaagcagtatttggcacggatttactggctctaacactggcaacattaccaacaaatcacttgtaggcaccttgcttttggttttagctttctatctgttctaccaatatttcttttcaaaaggatccttttcaagaacactcctccacgtctgtctagtactcctattagctctgggatactttgggactgttgctggaacctctggtgggctttatctccttgatactgtcaataacgtctctaaagacgttaccaaaaagattgcaggaattaaggttgactatgccaaagacaagtccattaaaattggaaaatcgatgtcggacagctacattgcagaaacatcttataaagcctatgtcttcgtcaatactggccaagaaaatggaaaatacaagaacagccaagacgggaaagaagaggcttttgacgacagtaaagttcttggaacgagtgataagaatggaaacttcaagtcagtcaaagcgaaagaccgttccaagtatttagatgatttaggagatggcgccaacgatgatggtgaaaagaaccgttgggtatcagctatgccagacttcattttcactaggatgttctatgtgatttttaaaattgtagaagcctttgtattagccgtccctattatccttatccagctcttaaatgtggtcgctcaaatccttgttctcactatgattctactttttccagtagtccttctcatatcattcgttccaaggatgcaagagttagtctttggggttcttaaagttatgtttgggggcttgatttttccagcgattacaactctcttaacactccttattttctatattgaaaaaatgatagaaaacattgtcacaaatgggtttgatggtgttctaaaaaccctaccgtcacttcttttatttggtcttgtcttcaaactcttagtatcggtggtttctaaaggtgtcatctatttcctcatctggagatttaaaggccaactcctccaattcatccttggctccaaagctcgaatggttgcgacagatattgggactaaagttgaacatggcgtcacaaagaccaaagaggttgcttcacaagtcccaacacgaagccttgcgacggctcaacacctcggaaactttgcattgactggtgctggttttgggactggggtgatgatgaatgccaagagccatttccaaaatgctggctccttctttactcgtaaggaaccaagtcagccggaaactgtcctgccatctggaccaacagaggctccaatacccccagaagctccagaaccaatcattcctccaacacagacaccacctgatacttttaagccaattgaagaagagaacccaacacctccaagtgactcaccaatcatgtcagaaggaatacctcgttcagaagacgaattccaaacgctcagagaagagtggatttcaccattcaaacaacaccgtatcaataccctagaacgtagattggatgcttacaaggaccctcaagccatgtataaagctcaaggatctaatgccttcacccgtgcttatcgtcagactatgacacgagatgataaaataagagccaatatcgagcgacgagatcgtttaacgcaacgcctaaaccaattgagaggagaatagaatgaatactaaaatacgctcaagaacagcctttccaagaatgcttgaagaaacactttttaaggcttaccaagaaggaaaacgctccgtcgatttccttcttttatttccagtctcagaaaaagacaaagaccagatcattgcacaaacaaaagctcattccgtcgtcttagatgccaaatggcgctttgggactgttctatttacagcttatatcagacattgagtagaaaggagagtcgatgaaaaaactaaaatggtatctattatctagtcttattcctctcttttttcctgtttttatcattatcatcattatgggagcagtcggaggaggtagcactggtggctcttctcaatcaccaaatggggcaacctatacggaccactggtcaaatggagatccctatacccataatttactcgtccatcgctatggtattaaagcagagcaattggacggttttttagatactttaggaatctcctatgacaagaagcgtatcaatggtaaaaagctcctagattgggaggctaagtctaatctagatgttcgtgccattgtagcgattgccttaaatgaaagctcacttggaacagctggagttgctacaaatcctggttccaacatgtttggttttggggcattcgactctaatccagaaaacgccaataattttaacgatgaagtggcggttgttggactcaccaatcagaccatcattggcaataaaaatgaaaccttcaaggtccaagatgacaaagctcaaaaatttgcgagtggttctctcaatacgtcaacagatggtggggtctacttcactgatacttctggctcaggaaaaaggcgtgctgaaaccatgcaaaaactcgatacttatatcgatgagcatggaggcacacccaaggcccctgaacaaacgacaggaaaaaccagagacggaggcggtgtcacaacgggggatgtcccacaaggctacagcctcaccaaagaaatcaatacctcaagctatgcaggtctgtcttatccttggggacaatgtacctggtttgtctataaccgaggaaaagaagtcggtgttagcttcggagaatatatgggaaatgggggtcaatggatgaatgcccctagttaccaaacaactcatacccctaccgaacactccgcactatcttttagctcaggacaagctggtgcagatccaacctatggacacgttgcctttgtggaacaagtcaaatcagatggctctattcttatctctgaatcaaacgtcaaaggcctaggagtcgttagctaccgcacttttgatgcagaaacagcaaaacaatttacttatgttattggaaaatagaaaggagttatttatgctaaagcttaaatacgtaccagttgaaaactgcaaagccgaatggggtgataagttagcattaatgaaaagatttgaaggattaaaattgaaaaccttaaacaatctgttaactgagatgagaatgaatccccaattcaaagactatgtgattaattccggtcacagaactgtttggatcaacttcgagggtttcttaaatttcttacgctataggcaaaataaacgatttaaggaggtgggataatggagcgagtaagaatacaatctatcatacaaaaatcaactcgaacatcgactaaaaaaggatatattgatgttaaattcaggacacgttttattaaccctttaactgaaaaaaggcgggaaatagtttctgattggtattcattacctaataaaaaagacgaggatggtcgaatcaaactttcagcacaagtaaaatcgcttatatttagtgagcttcaagataaagcaaatatactttatgaagaactaaccaaagaatctttacgaaaacgaagcaatatcactttgtatgaagtctggcatgaatggcatcaaacgagaattgaacagaagttagtagctcctaaaactttagctggggaagatggtagatacagaaaccatattttacctcatattccaaaagaaacgatactaaaaaatattcccactagtttaataaaagagattatagatcaactttacccaatcggaaaccacaaacgaatagctcaatcaattaaatcagacttgtcttccatattcaagtatgctattgcacatgattatattacgcctaatcagaatcccatgccttatataacaattggtagaaaagggctttctgacgaattagaacgtttaaagaaatcagatatagaagaccaatatctcgaatcttgggaactcaaagaagtattatccattgttcgtaagtacaatgaacagtatgcacgtatttttgaatttcaagcactaaccggaatgcgtattggtgaagtactcggtttaaaggaggaagctattgattttaataaaaatatagcctcagttattagaactcgtgctactcacggaggagcctctgaagatagctatgaaggtaacgttaaaaatgtacaaagttatcgaaacgttcaattatcaatacgggctgttgaaattctaaaagaagaaattgaattaaatcatcatcatatagaattcaatccagattataaagataatggatggattttcacctctaagaacatccataaacctgattacaatggaactcctcttcattacagtgtcttaaacaacttcctcaactcttcagaaaatggaaaactaaaccgcaagggaaagccgagacgagcaggaatcgatattgacaataagcttagtttcaagaaacatattacaactcatatcttccgacacacgcatatcagcttcttagctgaacaaggagtacctttggaggctattcaagatcgtgttggacacacaagggggagtcgagtaacacaaatttatttacacgttacacagaaaactaagaacacaatcactccaatgattgatcaattgacaaaataagcaaaattttgctacatctatgatcaaaatggactgaaatttataaatcgggggcaaaatgggggcaaaacataagaaaaaggcttgtccatattggacaaaccctttcatttcaagcttatataacctaattaagctttgtttgctgaaccgaatacgtcgatacgttcttcaacagcttctgtaatagcttcgaaacctggtttcaagaatttacgtgggtcgaagagtttcttcttgtcgtattctgcttcatttgcttcgtattcagcaacaaatttacgtgttgcgttagcaaatgcgatttgacattcagtgttaacgttaactttagcaacaccaagtttgatagcttcttggatttgatcatcaggaatacctgatccaccgtgcaatacgattgggaagttaggaacagcttctgtcaatttttgcaagtggtcaaggtgaagtccgctccagttttctgggtaaggaccgtggatgttaccgatacctgctgcaaggaagtcgataccagttgcaaccatagctttagcatcttcgattggtgccaattcaccatcaccgatgataccatcttcttcaccaccgattgtaccaacttcagcttcaactgatacaccgttagcgtgtgcaaattcaacaactttagctgctttttcaaggttttcttcaactggaaggtgtgaaccgtcaaacataactgaagtgtaacctacacggatacattccaaagcatcatcgtagtgaccgtggtcaaggtgaatagcaactggtacagtgatacccattgattcaaccaattcttcgataagaactttacacaatttgtaaccacccatgtacttagctgcacccatagaagtttggataagtactggagcttgtttagcttctgctgcacgcaagatagcttgagtccactcaaggttgtttgtgttaaatccaccaactgcgtaaccattatcacgagctgcttggacaaatttttctgctgaaacgattgccattataaaggcctcctatatttttttgggtttgaacccgtttacaagtttattctatcacaattagactcaaaaaactagcttttctacaatttgtaagcgttttgattttttaatacaaaaaaaccagtcatctgactggttactctgcggaaagagggacttgaaccctcacgacctaaagcggtcacaggatccttagtcctgcgcgtctgccaattccgccatttccgctaacaacattagttattatatcaagattgacaactcgtgtcaatagtttttttgaaagttttttataactttctcttgtctctttcgaaacaactactatataataccatttattgtttactgacgtcaatacttttttgcctttttttaaattttttagcaaaagttatctattatatcttttatcaaatgttaagctaaactcttattcagtttatctaatttctctctaaggggagctaagtaaacttcttctccaaaaccacgcgattttaagccatcctcagcacaagccaataacgattctgtcaaaggtaaaatcattttgaggcctgtagcagaaatatcttttttcgaaaataaacgacgaattctaggaaaatcatagtcaaatgcttcaaaaaaaggtgagtcattcaaaatattttccagcttttccaaattgactaaaagaccaaggtgaaaggctgctggtgcaaaggttgatgagaaaggttgagtacaaacactgcgaaactcaatcgtccctcgcgtcgttaaatcttggaattgataagaacggtgagtcttaaaatcttcctcacttggctcaatagtgactacttcgccatgaatagagtgtgctttgacagatgacgtacttagatagtctttagcacgtattggttcaaaatagtaggtttcatcaccacgcttagcagtaaaaatggctgtctcagacaagtaagaaaaatagtcatcttcgctcttaaacaccttgggaaatacccctgcattttcctcaaacacaccatgcatggaattctcccagaaaacatcacgagaaagcgctaaatcccaatcagaaccccaaaattcagagtttgccaataatactgccttgggtccctctatttgattaaaagcatttaaaacccttaaataggacgtttttgaaacatctaactgtacctgactcccacagatgaaagaaccatattctggataatcatgaaagaaaggatccttctttgctttagatagctcgagaaaatccataagcatctcataacgaggagatttaacaggtctgttgtcatttttttcccagtttggattcactccccaaccttgcaactcatgattatgattctgaagataaggttggattataccgaggtaagtatccaaacgttcctctacctcagagattctttcagcctttgcaaaagcaaactcaatcgtattgtaagagacctcaaaaagaatcatatctccagaagctttatcaataagctgaataggattgttatcagaatcatacttatcagcttgaaaatcaaaattatccatgagatagactagtaactgttttgtaagagagacatctgtcgcattaccactcaaattaacgacagggtattccaactcaatccccacaaataattcaggttgctccttaattggctcatagtacctttgcttaagcagttccttggctgttgtcaaaataatgtccccctttttgaaataagcttattccattatatcaaaatattcagacgatttatagcccaaaaaaacgcctgcttacgaaaaataacagtattacctttcgtaaacaagcgttacatgcttatttattcccatttttatgatgagtgttcccgctaggcttttgcccagcggtagaccagagctagactaagaaaagctaagctattccatcatcataacactcaacaaaattgataaaaattaaacaagttcgatgattgccattggggcagcatcgccacgacgtggttctgttttaaggatacgagtgtatccaccgttacgttcagcataacgaggtgcgatttctgagaaaagtttttgaagagcagttgttgatgtatatttatcagttgcttcatcatagctttcagatgcaatttcgttacgtacaaatgcagctgcttgacgacgtgcgtgcaaatcaccacgtttaccaagagtgatcattttttcaactgttttacggatttctttagcacgtgcttcagttgtaacgattgcttcgttaatgataagatctgtagtcaaatcacgaagaaccgctttacgttgtgagcttgtgcgtccaagtttacggtaagccatgttatcctcctatattattatttatcgtttttgagtccaagtccaagatcagccaacttaactttgacttcttcaagagatttacgacctaggttacggactttcatcatttcaggctcagttttttctgtcaaatcatgaacggtattaataccggcacgtttcaaacagttatatgagcgtacagacaaatcaagttcttcgatggtacggtcaagcaccttttcatcgttcactttttcagtttctttcattacatcagtagctttagcaacatcagtaaggtcagtaaacaagttcaagtgttcaatcaaaacgcgagccgagagaccgagggcatcttcagggatgattgttccgtttgtcatgatttcgattgtcaatttatcaaaaccatcgttgctacctacacgggcaggttcaacttgataattgacttttttcactggtgtgtagattgaatctacagccaatgttcccactggtgcatcatctttcttgttttcatctgctggaacataaccacggtttgtagctactgtcatagtcgctttcaaagaagctccttcagcgatagtgaaaagataatgatcagggttaacaatttcaatgtcgctatcagtcaagatatctccagcagtaacttcagctggaccttgaacatcaagttcaattgttttttcgtcttcgacgtaagattttacagcaagtcctttaatattaaggatgatttgcatcacgtcttcacggacgcctggtacggtatcaaattcgtggagtactccatcaatcttaattgatgttacggcagcacctggaagtgatgacaaaagtacacgacgaagagagttacccaaagttgtaccataaccacgttctagtggttcgatgacaaatttgccgtaatctttattttcatcaatttttgttattattggtttttcaaactcaatcatttattatactccctcgaaacgaaccttgtgtactattgttattaaagattacacacgacgacgttttggaggacgacaaccattatgtggtacaggtgttacatcacggattgctgttacttcaagacctgcagcagcaagagcacggatagcagactcacgacctgaaccaggacctttaacagttacttcaactgttttaagaccatgttcttgtgcagatttagcagcagcttctgaagccatttgtgcagcaaatggtgtagatttacgagaacctttgaaaccaagagcaccagctgatgaccatgctacagcgttaccatgcacatctgtaatcataacaatagtgttattgaaagtagcgtgaatgtgagcaataccagattcgatattctttttcacacgacgtttacgtgttggtttagccaatgtttttacctcctattttattttaattattttttcttacctgcaatcgcaacagctttacctttacgagtgcgggcattgtttttagtgttttgtccacggacaggaagtccacgacggtgacggataccacggtatgaaccgatttccatcaaacgtttgatgttaaggttaacttcacgacgaaggtcaccttcaactttgattgcatccacttcgcgacggatagcgtcttcttgatcgtttgtcaaatctttaacgcggatgtcttcagaaacacctgcagcagctaagattttcttagatgttgcaagtccgataccgtaaacgtaagtaagtgaaattactacacgtttatcgtttggaatgtcaactccagcaatacgagccatgatttctcctttctatattatccttgacgttgtttgtgttttggatttgttggacaaattaccataacacgaccgttacgacgaataactttacagtattcgcaaattggtttaaccgatggtcttaccttcatgttttaatccctccaattatttcgattatttaaagcggtatgtgatgcgtccacgtgtcaaatcataaggactcatttcaacagtcacacggtcaccgaccaaaatacgaatgtagtttttacggattttaccagaaactgtcgccaaaatttggtgtccattttccaattcaacagtaaacatagcattaggcatagtttctacaactttaccttcaatttcaatcacgtcttcttttgccacgcaaaagtaccccctaaaatttcgatttgatttcctctgagcacagaggtaacaattataagtcagactaaaatattataacatgcttaagtctgatacgcaagtaagattatataattatttaattgctgcaatcgcttttttaacatcagcgaatacatcgtcgatatcttggttaccttgaatatctgatacaagaccaagctcacggtaatgtgcaataattggctcaccttgagcaatattcacatccaagcggcgtttcactgtttctggtttgtcatcttcacgttggtaatagtcttcttccttgtagtcagctggtgggttgaatactttatggtaagtttcacctgtttcgcggtgaataatacgaccactcaagcgttcaagaaggcaagatggatccacttcgatattgattactccatcaagctccaaaccaagatcaaccaagatttgatccaaggaatgagcttgttcgattgtgcgaggaaaaccatccaaaaggaatcctttttccttaatgtcgtcttgagccaaacgctctttaacgattccatttgtcacttcatctggtaccaattcacctttatcgatgaatgattttgccaaagttcccatttctgtttggttagccatagcagcacggaacatatcaccagttgagatgtgagctacaccaaattcttcaacaatttttgcagcttgagtccctttaccagcacctggtagacccataattaaaagattcatcttacgaactccttatttttgttttcaaataactctatcaaagtttaaaaacattggtagagttatcaaaaaacaaaagagaagggacagaaagtaacctttctttccctctcaattgttcatgagaagacttagtcttcaagattcataaatccaacgtactgacgtttcaataggtaaccttcgagttgtttcataccttcgataccagttgaaatcaagatcaaaagagatgtaccaccaagcgcgattgagcttgtaaggtgcataaactgttgagccgcaattggagccaatgaaataaacgcgagaaatacagccccgattgttgccaatctcttaagcaatgaagacatgtacttttcagtctcacgacctggacgaacactaggaatataagacccattcttttgaagattttctgcagttttttcaggatttacttggacaaatgtgtagaagaatgagaacaagataatcaatatcgcgtaagtgatcattccactaggtgtattatacgagagtagtccttgtaagtgtgataaccatgtaaccttcgagaagaatggaagaatagtactagggattgttgtaatcgagctagcaaagataacgggaataacaccagctggattaactttcaatggaaggtaagaactcgttggagccccttgaaccaatttagtatattgaattggaatttgatattctgcctgttgaacaaatgtcgtaaagaagacaatcgccaaacctaccacaattagcaaagcaactatgatatatgaacgagtcaattctcctgaacgaacgttgacaaagaaatcctcgtaaattgttgagaacatttttggaatagaagcaatgatccctgaaaagataatcattgacacaccattaccaaaacctttatctgtgatttgttcaccaagccatgtcacaattatgctaccagcagttagaattgtcccaatcaataggtaggttgaaacatttggtgttttaaccaatgaaattgatgagagagtattaaaacttgctgtaataccaatcgattgaacaaaggctaaaacaagagtgatgtagcgagtcgcttggttcaatttacgacgaccaacttccccttgtttgccccactctacaaattttggataaatatccatctgcaaaagttggacaatgattgatgctgtaatgtaaggactaacccccatcgagaagatagagaagttattcatggcattaccagacaccaagttaagcatgttcaagaaaggtaaatcacttaattgtttcaaactttccgcattgataccaggaactgttacatgagtccctacacgaaaaacgaaaataatgaagattgtaaataaaatcttattacgaacgtttttgactttcaatgcgtcttttaatagtttaaagaacataatgagttacccctcattagatgacttcgattgaaccacctttagcagtgatagctgcttcagcagattttgagaatttagctgctttaacagtcagtttcttagtcaattcgccgttaccaagaactttaacgcctgatttttcagcacgaacgattccagcttctttaagaactgctggagttacttctgtaccatcttcaaagacgttcaattgatcaaggtttacaagtgcgtattctttagcgttgatgttagtgaatccacgttttggaagacgacggaacaatggagtttgtccaccttcaaatcctggacgtacaccaccaccgctacgagctttttgacctttttgaccacggcctgaagttttaccgttaccagatgaagtaccacgacctacacggttacggactttacgagaaccttcagcaggtttcaattcatgaagtttcattattattttctcctctttttgtaaaatgctagcgcctctaaccaagtaaggtagcttaattagaaactcgcctatacatgaaattcagtttaagtcgcaagggaaccctcacgacttaaatcaatttttatttaacgtcttctacagttaccaagtgagatactgcgttgaccataccacggatagcagcgttgtcttctttaacaactgagctattcaatttaccaagtccaagagcaacaactgttttacgttgttctggtttgcgtccgattggagacttagtcaaagtaattttaatttgagccattgttatctcctttcttatgccaagtcagatactgagatgccacgaagagccgcaacttcttcagcacgtttaagttgtttcaacccttcaacagtcgcacgaacgatgttgattggagtgtttgaaccgagtgatttagatgttacatcagcaacaccagccaattcgatgacggcacgaactgcaccaccagcggcaaccccagccccttcaacagctggtttcaacaatactttcgctccaccaaattctgaacgaacttcgtgaggaatagttgtaccaaccataggaacttcgataaggtttttcttagctgcttcaactgctttacggatagcttctggaacctcttgagatttaccagtaccaaatcctacgcgaccattacggtcaccaacaacaacaagagcagcaaaacgcatgttgcgtccaccttttacaactttagtaacacggttgatagcaactacgcgttcttcaagttctactgcattatctttaaatgccattattaagtgtcctccctattagaatttcaatccgttttcacgagctgagtcagccaaagctttaacacgtccgtgatagagatatccaccgcggtcaaacaccacttcagaaatacctttagctactgcgcgttcagcaacaagtttaccgacaacaacggcttgttctgttttagttcctttagaaacttctttatcaagagttgatgcacttgcgagcgttacacccgctacgtcatcaataacttgagcgtagatgcctgtattagaacggaaaatgttcaaacgtgggcgatcagcagttccagagagttttccgcgaacgcgacggtggcgtttttggcggagtttgtttttatctggtttcgaaatcacaattttcacctcttaattataatgcttgctcatgagagcttttggtaaagagacaatccaaaaagaattgccaaaaggataaaatcctattatttaccagttttaccttctttacgacgtacgtattcaccaacgtaacggatacctttacctttgtaaggttctggtgaacgaaggctacggatgtaagcagctgtttgaccaacaacttctttgttaataccacttacaacgattgaagttgcagatggtacttcaaaagtaataccttctggagcttcaacttcgtcttggtgagatttaccaactgaaagaacaagttttgttccttggagttgcgcacgatatccgacaccgcgcatttcaagttcttttttgaaaccttcagaaacaccaacaaccatgttgttcaagtttgcacgtgaagtaccgtggattgttttgttttcttttgagtcgtttggacggtgaagtgtaacttcgttgccttcaactttgatttcaatgtttttgttaaactcacgagtgagttcgcctttaggtcctttaacagtaacaacgttatcgttgtttgttacttcaacaccagcaggcaaagtaataactttattaccaatacgtgacatagtatttaattctcctgttagattatcaagccacaaagtgactagttttcacggggatgagtttcatcgaatataatcaacgaaactcgcacaaatcatttgagataagtgcttagtatcagcttcttaccaaacgtaagcgataacttctccaccaacgttcttttgacgagcttctttgtcagtcaaaagaccttctgaagtagagatgatcgcgattccaagtccgttaagaactttaggaacatcttcacgtttagagtaaacacgaagacctggttttgagatacgtttcaagttagtgataacacgttcaccgttttgtccgtatttcaagaatacgcggatgataccttgtttgtcatcttcgataacttcaacgttttttacgaaaccttcacgtttaaggatttcagcgataccttttttaatgtttgatgcaggtacttcaagtacttcgtgtttagcttggttagcgttacgaatacgtgtcaagaaatctgcaattgggtcagtcataaccattttatattttctcctcttactagtagtttgaataattcacttgctagttaatgattgagctaggctcagattgtgtttaatacaatcaaattaggtaaaactaaattgattgtaccatgtttttaccaagaagctttggtaacacctggaatttgacctttgtaagccaattcacggaagcaaacacggcaaagtttaaatttgcgataaactgagtgtggacgtccacaacgttcgcaacgagtgtaagcttgcgtagagaacttcgcagggcgtttgttcttagcaatcattgattttttagccaatttatttacctcctagattattttgcaaaaggcattccaaggcctttaagcaattcacgaccttcttcgtcagtgttagcagtagttacgataacgatatccataccacgtactttatcaacatcgtcgaagttgatttctgggaagataagttgttctttaacaccaagtgtgtagttaccacgtccatcaaatgatttagttggaacaccatggaagtcacgaacacgtggaagtgatactgataccaatttatccaagaattcgtacatgcgttcaccacgaagggtaactttagcaccgatcgctacaccttcacgaagacggaagccagcgattgatttcttagctttagtaatcaatggtttttgacctgaaataagtgccaactcagcagcagctttttcaagagttttagcgttgtttacagcttcaccaacacccatgttgataacgattttatcaacttttggcacagccataactgaagaatagttaaatttttcagtcaaagctggaattacttcgttagtgtatttttctttaagacggttagccatttaatactttctcctttccttcgtgattagtcaagcacttcgcctgattttttgttgtaacgaacttttttgccgtcaacaactttgtaacctacacgtccagctaccccgttcttgtcaagaacttgaacgtttgaagcgtggattggtgcttctttttccacgatagcaccttgagggttttcagctgatggtttttggtgttttttgatgattgcaacaccttcaacaacaactttgtttacttttggaagagctttaagaactactgcttcagttcctttgtctttaccagcaataacgcgaactttatcgcctttttttacaaacatttgagtatttctcctattatttcttacgccctaatgggcaccctgaacatttcaggggactaagtttgtgttaattcagattaaagtacttctggcgccaaagatacgatacgcatgtatccaccttcacgcaattcacgtgcaacagggccaaagatacgagttccacgaggagttttgtcatcgcggatgattactgcagcgttatcatcaaacttgatgtatgaaccgtctggacggcgagcaccagtttttgtacgaacgataacagctttaacaacatcaccttttttaacagctccacctggtgtagcttgtttaacagttgcaacgataacgtcgccgatgttagcgaatttacgtcctgaaccaccaagaactttgatagtcaagatttcacgagcaccgctattatcagcaacttttaagcgactttcttgttgaatcatttcaattgtctccttttagttttattagataataacagcttcttccacaacttctacaagacggaagcgttttgtagctgaaagtgggcgagtttccatgatacgaacgatatcgccttctttagcaacgttgttttcatcatgtgctttgtattttttagaatagttgatacgtttaccatagactgggtggttacgttttgtttcaactacaactgtgattgttttatccatcttgtcagatactacgcgtccaacaagggttttacgttgattacgttccattattagaattgctcctttcccaatctattatttgatttcagattgcacagttttaacacgtgcaatttgttttttcacttcgttcaaacgggcagtttgatcaagttgacctgctgcagcttggaaacgaaggtcgaaaagttctttcttaagttcgttttcttttttagcaagctcttcttgagacaagccacgaagctcagcaacaaactttttgatttcttcaagtttcatgtcttctccttattctgcttcacgtttcacgaatttacatttaactggcaatttgtggctagcaagacgaagcgcttcacgtgcaacttcttcagaaacacctgcgatttcgaacattactttaccacgtttaactggtgctacccaaccttcaggtgcccctttaccagaacccatacgtacaccgatagctttagcagtgtatgatttgtgtgggaagatcttaatccaaaccttaccaccacgtttcatgtaacgagtcatggcaatacgagcagcctcgatttgacggtttgtaatccagtggctagttgtagcttgaagaccgtattcaccgaatgatacttctttaccacctttagcctcaccgcgcatttttccacggaattcacgacggtgtttaacacgtttaggtactaacatttgttatttgcctcctttagtgtttttacgagctggaagaacttctccacggtagatccaaactttaacaccaagtttaccgtaagttgtgtcagcttcttcccaagcgtaatcgatatcagcacgaagtgtgtgaagtggaactgtaccttcagagtatccttctgcacgggcgatatctgcaccgttcaaacgacctgatacttgagttttgattcctttagctccagcacgcattgcacgttggatagcttgtttttgtgcacgacggaaagcaacacgttgctcaagttggcgagcaattgtttcaccaacaaggtgagcgtccaaatcaggtttcttgatttcaacgatgttgatgtgtacttgttttccagtcaatttgttaagttgagcgcgaagagcgtcaacgtttgatccacctttaccgataaccatacctggttttgcagtgtgaagtgaaacaataactttgtttacagcacgttcgatttcaatagttgaaactgaagcgtctgcaagttctttttgaatgaatttgcggattgccaaatcttcgtgaaggtaatctgcgtattctttttcagcataccatttcgcatcccagtcacggatgatcccgacacgcataccaattggatgtactttttgacccacgagtttacctccttatttttctgacacaactactgttacgtgagttgtgcgtttgttgattggtgaagctgaacctttcgcacgtggacggaaacgtttcattgttggtccttcgtttgcgaatgtttcagatactaccaagttagctttttccaaaccaaagttgttttctgcgttagcgatagcagagttaagagttttctcaacaatgcgagctgctttgtttggagtgaatttcaagattgcgattgcatcagcaacgttcttaccacggataagatcaagaacaagacgtgttttacgaggtgaaacacgcactgtacgagccattgctttagctgaagtaatttctgccattgtgtcctcctcctattaacgacgtgttttcttatcgtcagctgcgtgacctttgtaagtacgagttggtgcaaattcaccaagtttgtgacctaccatgtcttcttggatgtaaacaggaacgtgtttacgtccatcataaactgcgatagtgtatccgatgaaacttgggaaaatcgttgaacgacgtgaccaagttttaattacttttttcttttcgtcatttgcttgagcttcaacttttttcatcaaatgctcatcgacgaaaggtccttttttaagactacgtcccattttgtagttttctcctttaaattgaatgtaccacagcggcttgcactaagaaatgctaccgagttggcggatggtatgtgctaagcgactaaattatttttcgttacgacgacgaacgataagtttgtcagatttagctttcttgttacgagttttaagaccaagcgcaggtttaccccatggagtagatggcgctttacgtccaactggtgctttaccttcaccaccaccatgtgggtgatcgttagggttcattacagaaccacgaactgttgggcgaatacctttccagcgattacggccggctttaccaaggttgataagtgattgttgttcgttacctacagtaccgatagttgcacgacatgtaccaagaaccatacgaacttcacctgattgaagacgaacaagtacgtatttaccttcttgacccaaaacttgagcagaagcaccagcggcacggataagttcagcacctttacctggttgaagctcgatgttgtggataactgtaccaactgggatgtttgcaagtggaagagcgttaccaatcttgatatccgcatctggacctgaaacgatatgttgacctacttcaagacctttaggtgcgatgatgtaagctttaaccccgtcagtgtagtgtacaagagcgatgtttgcagtacggtttggatcatactcaattgttttaacaactgcttcaacgccatctttgttacgtttgaagtcaatcaaacggtagtgacgtttgtgtccgccaccttggtgacgtacagtgatacgaccgttgttgttacgaccagctttgttcttaagagaaacaagcaatgatttttcaggagtgcttgtagtgatttctgcgaaatccaaagaagtcatgttacgacggccatttgtcgttggtttataaactttaatacccacgttaatttctcctttgattattcagcttcagctgcaaacaactcgattgctttagaatcagctgtaagagtgatgatagcttttttagtttttgaagtgaaaccagtgtaacgtccaacacgtttttgttttggtttaacagttacagtgttcacgctagcaactttaacaccttcaaatgcagcttcaactgcttgtttgatcaagagtttgtgtgcacgtgtatcaacttcgaaagtgtattttcctgcttcaagagcaatcatagatttctcagtgataacaggttttttgattacgtcatacaaattcattatgcaagaacctcctcgattgatgagatagcttctttagtaacaagaagtttatctgcgtttacgatgtcaagtacgcttgcagttgcaggagttgcaacagttacgtttgcaaggttacgtgctgaaagttcagcgaatttgtttccttcttcaacgataacaagtactttagaatcgatgctaagagctgaaagaacgtttgcgaattcagcagtttttggagctgcaaatgaaagagcttcaactgctacaaatttatcttctgcaactttagctgagtaaacagatttcaatgcaaggcgacgaactttttgtggaagtttgtatccgtaagaacgtggagttggtccgaagacaacaccaccaccacgccattgtggtgagcggatagaaccttgacgagcacgtccagtccctttttgacgccatggtttacgtccaccacctgatactgctgaacggtttttaaccgcgtgagtaccttggcgaaggctagcacgttggctgattacgacatcaaatactactgattcgtttggttcgataccgaagatagcgtcgttaagttcaactgtgctaacttctttaccagtttggtcaaatagttttacgtttgccatttttaactgatttctcctttcttattatttagcagctttaactgctgatttgatagtgataagagatttcttagcacctggtacgttacctttgataaggataacgtttttctctgggataacttgtacaacttcaaggttttgaattgtcacacggttgccacccatacgtcctgccaagtgtttgtttttgaaaacacggttaggcgcaacaggtcccattgaacctggacgacggtggtaacgagaaccgtgagccataggtccgcgtgattgaccgtggcgtttaataacaccttggaaacctttaccttttgaagtaccagttacgtcaacaacatctccagcttcgaatgtgtcaacagtgatttctgatccaacttccaagccttcaatgtttttgaattcacgaatgaagcgcttaggagctgtgttagctttcgctacgtggcctttggcaggtttgttgctcaatacttcgcgtttgtcgtcaaaaccaacttgaactgcttcgtaaccgtctgtttcaacagttttaacttgaagcacaacgtttggagtagcttcgatgacagtaacagggataaattcacctgcttcagtgaagatttgagtcattcccacttttttccctaagattccttttgtcatgagaaaatatttcctttactttattgttttttcaaaaagttttttatgagcgttttttatgctcaaaaaagtttttaacgagcgttttttatgctcattgaatcaaactgtaaattaaagtttgatttctacgttcacaccacttggaagatcaagtttcatcaaagcgtcaactgttttttgagttgggttgatgatgtcgataagacgtttgtgtgtacgcatttcaaattgttcgcgagaatctttatatttgtgagtcgcacgaataattgtgtagagactacgttcagttggaagtggaactggcccagcaactgtcgcacctgtgcgagttgcagtttctacgattttttcagccgctgtatcaagcgtacggtgttcgtaagctttcaaacggatacgaatttttttgtttgccattttttctcctctttcgtctatttaagataataggctagctcctcaagaaaaccaacacggattgcgtggcagtgcaaccaggcgtgtcgcaacctcttgtatcatagctaagcgctgtatttacagcaccataatataataacaaaagaacctactcattgcaagggatttttttagtttttttctttttctttattttattttttgcctaaacaaaaaaatccatcttcgatggattttttatcaactttcttgagtgtagtcgtaccccatatgttcataggctttaaccgttgcaacacgacctgttcgtgtacgcataatgaatcctttttgaattaggtagggttcatacatatcttctaccgtttctcgctcttctgcaatattcaccgacaaggtacctagaccaaccggtcccccaccatacatttcaatcatggtgcggagaattttttggtcgacataatctagtccttcatggtccacatccaacatagtcaacgccttgtctgcaatcttatcatcaatgatgccatcacccataatttgtgcatagtctctcacgcgcttaagtaggcggttagcaatacgaggcgtcccacggctacgacgtgctagctctagagcagcttcaggtgttatagtcatgtcaaagatttctgaagtacgttcaataatttccttcaaatctggtagctcataatattccatatgaccattaatcccaaagcgagccctcaatggatttgacaacatacctgctcgagtagttgcacctactaatgtgaaaggtggtaactctagatggacactacgacttgtttcgcctgcaccaatcatgatatcaatgtagtaatcttccatagcactataaagaacttcttccactgccataggcatccggtgaatctcatcaataaataagatatcacctggctccaagtcattgagtatggcaactaaatcaccagccttttcaattgctggcccagacgtctgctttaaattaacgcccatctcattagctatcacaaaagccatggttgttttccccaaacctggaggaccaaacaaaagagtatgatctagtgcttcatcacgaagtttagctgcctctataaaaatctttaattggtctttaaccttatcttgaccaatatattccttaaagtactgaggacgaagggtacgctcaacatactcttcatctcctagtaaatcattatctaatattcttgtcataggcttattttagcacaaaacaaaaaatgcagtcaaaatttgtccataaaaaagaagacaagacttgccttctcttttaattatttcttaccacccttaactggtgctttatcagctttctctatagcttctttaattgtcttagtatagagtttagcaccacggttaattgagtcgctatcggatccaaagtgaaccccatctgtaccattccagatagaaatattttctttagccacttgataccagtcagcaaccgtcacaaagtcgtatttcttagccatctctaactcatacttacgtaactgaatcaaagattgggcctcattaccagatttactaccattatatggtgtcacaaagataatatggtgacccttaggtaaattcttgatgattttattaataacgcctttatagtcgtcaatctcattaacaccaccagcaatgacaacatccttagcaagagcattactatccgcgtaatctttaagcaaatcattgattgttgataggttacgactgacaactgcatctatagcgacattatcaatacttgattccagctgatcttttgatctaagagctacggagtcccctaaaactgtcactcccttattcacaccaaatgaagtagcctgactgttttccgcattggtacgcgttaatttcatcttagtctgagcttgcgacaaaccattagcttctaaatctttctcgaagttccctacagctggcgcaaagagagaaataagcactgtaattaaagtaagaccactaaaaacataaagcacaatatgtcggtacggcgtcaagtctaaatctattccaaagagactggcctttcttcctgcaataaatggctctattatatagtaggaaagtgttgcgaaaacaattgacagaatcgttgtcagaatgactgcaataatattattggtcaattgactaaagataatatatagcggccagtgaaaaagatagacactatagctaatctctgccaaataactaataagagcaggctctgattttccaggcaatttctcatggaggacacgggcagagtaaatcataacagccgtgaacaaactagctaaaacaaaaccaaatagataggtaatgcgttcctcaaaatggagaactaagcccaacaatacgagcaaggcaaaacttcctaccatataaaggactgtctttttcagagtccaaaggcgtatatttttcttgaacctagcggtcgtttcatacacacctgaaagtgtcgcaaagagagaacctaggaagaatggataggcatgcgtaattgatgagaaatataagcgagaaaaactatcaacaaagaaagcactaataaacattgatagaaaactcaccataaagcaggcaagagataccataaagactaggcttctaaattgattttgatgtttaacacgcttagctaggaaccaaagcaaggcaccccaaagaatataatagtgaacctcaatagccagactccatgtatggaggtaaatatgctggttaaactggttctcataatttcccccggtcaaaatctcataatagttagttacaaaaccgataacagaggtgatttgacgtccaatacctgcaataaaatcatttcgaaccaagagtgccaaaggggtgcagataagaaccatcaacacaagtggtggtactatccggtagaagcgtcgtcgcataaaaccaaggtaatcaatgcgatgcgtcctagatacctcatcaatcaaaagcgctgtaatcaaataccctgagaaggtaaagaagacatcaacaccgatgaagcccccaggaagaatacttgggaagaaatgatagatcagaaccaaaagaagtcctgtcacacgaatataagaaaaccagttaattctcatcctttaaaaatcccctgtttaaattttcctttgtaggtaaccttattttcagtagtcaattttccttgaccatcggcttgaccagacttgaactctccttgataaatccaaccctcatgagatttgaaggttccttgaccattaaaggaaccattcttaaattctcccgtataggtatcaccattatcataggtcaaagttccttgaccattcaaacgatggttctgcatctgacctttataggcaatcttagtcccatcaatcttgatagaatgttgcgtttttatagtcaccaaaaacaaggacagggcgcataaaataataacccctactgtaatacgctcaaattgatttcggtcaatatcaatatttttaaaatcaaaatcctttagttgtttaaaattcattgtctatccttaatccactgtaaccaatctcgacaacctgcagttaccaatttgtatgtttcttcaaagtcacctgtataccatgggtccggaactccaccaggtctgaaaagcttgattttatcgtcataacgccctgcagatatctgtagaagatcctcaacatttgactcatccattcccacaactaaatcaaagaactcaaaatcggcctgactaatctgttgtgagcccttggaagagtcaaaagaaatagcatatttccttaaaatcttttgggttccttgatgaactggatttccatgctcccatgaagatgtcgcgcgactttcgatatgcaaagacttttcttggtccagctctttcatcacaaattctgccattgggctacgacaaatattccccagacaaacaaatacaatcttattcattattcacctcttgcccaaaactattaaaagatctgctcacttattttcttcgtcaaaattatgaacacacttttaaatcatgaaagtaggttctcattaattttcatttaatcaatccatattataccgaaaaactaatcaaatagaaaggtttctttcctaatcatatcgaaaaattagtaaccttttttaacagttgcaatattcctattaatctatatatttaaggcgtgagaaaagagaacctagtttcctagattctctttttgttggctttagatatttgaccaaacactttcaaggatgtttgtttgttcacgtcctggtcctacagagaaagtagagatacgtacacctaccaattcaccaacacgacgaacataattacgagcattttcaggaagctcatctaaactacggcaacctgtgatgtcttcttcccaacctggcaattcttcatagattggtttgcaacgtttcagttgctcaagactagctgggtagtgatcaatacgctcaccatcaaggtcataagctacacaaatttttacagtgtcaagacctgagagaacatcgatacagttcaagctgaggtttgtgatacctgatacacgacggctatggcgcatcaccactgagtcaaaccatcctacacgacgtggacgtccagttgttgttccatattcatgaccaacttcacggatgcgttcacccacttcatcaaataactcagttgggaaaggaccatcaccaacacgactcgtataggccttacatacaccaactaccttattaattttagatggaccaacaccagaaccgattgtaacaccacccgcaactgggtttgatgacgttacaaatgggtaagtaccttggtcaatatcaagcataaccccttgagctccttcaaagaggacacgtttacctgcatcaagagcatcattcaagataacggatgtatctgtgacatattgcttaatttgttgtccgtaagcgtagtattcttcaaaaatctcatcgaatgataattcttcagcttcatacatcttactgaaaagacggtttttctcagctaagttcgttttcaaacgatcagcaaaaatttctttgtccaaaaggtctgcaatacggatacctacacgcgcagccttatccatataggcaggaccaatacctttgttagttgtaccaatcttattgtcacctttggcggcttcttgcagttgatcaagtttaatatggtatggcaaaataacgtgtgcgcggtcagaaatacgaaggctctctgttgacacaccttctgcatgaagatattccaactctttgacaagtgatttaggattgaccactacaccgttcccgataacagagattttctctgggaagaaaatacctgatggaatcaagtgcaatttaaatttcttaccatcgataacaatcgtgtgacctgcattgtctccaccttgataacgtgcgatcacttcggcatcttgacttaggaaatctgtaattttccctttaccttcatcaccccactgggtacccacaacaactactgatgtcatattattttgataacggacagctccacctttacgaggctgtccccacctttcttgaaaaacttcacggtgggaatttcacccacaagttttgcgttacagtttattatagcagaaaaaagtctatttgttcaacgttgaaagcacttcttacaaaatattctgacagttatagctaagattgcaactagttatttactatatctttttaaccttgcttcttatgtataactatcagctatttaacctgcttcatataatcatttaactgcctttgattctttaaaataattgtcttgtcagaataatttttaacaactgcattatatcgctctacatattttttagaacgtccgtctaataaaatccatttcacaaatgcaaaatcaaatttttcattacagccttctgccatgctaggacgtgtctttcccctatatgttaaataacgcctaaatgcccgatagaggcaattaactctgttaaagttgaaatagacaatacagtcagcttctctcatacgttcttcataaagacaggccgagtaattcccttcaataatccaatcactttgtagcataaatgttgatatattgccggtcatttcatcaactgttcgctcttgccaatttgatgtgaaatgaattttatctaaatgaagtacctcacaattgtagtgttgacctaaaaaatttgccaaagtcgactttccagaaccactatagccaatgattgcaattttcaactcatgtctcctttttcatttctgtttcttgactattatcataacacaaagcatatatttagaagaaattatcattgggaacaactctcgtttagacaaacaagcatgtaaagttctgtttaaagtgagttctttcttagaaaaataaaaaagagacttataagcaagtctcttcccgatattaagatgccccctacatggatttgtaagaacttttcatattgaaaataaacaaaaatgttgaaatatagctgattttagggaaatacttttaggtgttttcaatgtcaggatttaaaaatggggcaaaagtggggcaaaaacgaatgactcgtattttgtttgaaaacctataatacctaatgattatgctattctagatatatagttttgttataaataaatgtcagtgcgagatcaaattggaggataaaatggaaaaacaaattaatgaaaaaaaagccttggttcccaaagcttttttatgttataaactcattaaaagaacccccagttagatttggaatattttttattctgtgtcacataaaaataaataaaatgaatggctatagctagagcgaagatggttgcaatactcagcactattgtaggattcgaagcgaaaaccaaagagagaatcaaggcagccagatagagtgtcgcttgagcacagtagtaacttttcgaatagcgaagatagtttttgttatagggcccatttgctaggacagcagcttggaagaggccaattccgatataaaagaagctgattgcaacgagaagattagcctcaggattcagaagaaaacccatcgaaactgtcatcaacataagcccaatgaaaataggatagtgactataaattataaataatcccttttgattggatccttcgtcaatagcatggtcaaattcaccaaaataaaacaagaacagagaaagcatgataacgaaattaagaaccgaatatatcgagaaattctcaactgtaaagaagttaactagcccaataaccatctctccaaacgtaataatgacaagaagggagacgcgctcgattaaatggggaagatttacttggaaatgctcatctttagtaatcaagaaaattggcacaataaatgttagcagaatactagcaataaagatatagactccaacgtaaataggaaaaagagctgccagatagactcctaagctttgtagacctgtcaaccatagaaaacctttgatactttcccgatcagcactatcggttgatcctctaaaaaactgaaccaaatattgaaaaaataaggtaagggttaatgtgccaacagcccaacaggtatgatagtaccattgttgccaattgtatccaatcatattggatataaagagcataagtcccatgttgataaacatgattaccatgttaaataacgagtttgttccatagcgattggtataaatggtttgaatcatccaggaattgatgataaccatgacagagatgaagaaatcaagtaaagagtcccaagccaaaacaccgttatgaatagggtgaattaaagcagttgcttttgaaattgcaaaaacaaacactaggtcataaaatagttctgaaaattctacacgtttatgcttaataagagttgccatcttaagacctttctattctagaagtacaatttattataacagaaaatggtaatgagagaaaaggagatgcttaaataacttcatgtgacgcgaattgtcaaaaccttggagcacatttacctcatgtaccaactcacaggcagagtgtttgatgattgataatgaagaataagattttacaatagaaaagcgaggatatcctcgctttttttatttaatctaatagctccttattttcaattaagagctctagtggagatttatctcttgcttcaataaaaccaggttcatattgggtatgaagtgttcttttctgagaagttggatcaatatacaactcttttccatcttctgtgtatagttggttgcctcttgttaggtaaagtaaatcctctaagtactgtccatcagtatgtaggaaatgctcgatgtatttgacagcttttaagatttcacttactttatcagagtattcattagattcaagaacactcttttctaactcaatctctttactcgttccaaagagttgggttggagttgcattaaaatattctgctatcttatccaaatttgcaaaggtaggatagcttttttgtttttcgtaatcagagatggactgtttaccgattcctaattacctcagtctcttcagtctgttaattttttttcgaaaatttctctttaatattagctttcaatttatcaaatttttcacgacgagcttcttttttatccgcaattaagcgagctttagcttgatgctctaaatcttcttgaattttgagagctgactctatttctgccgcaacagtagcgacatcccacctagcaatgtgaacctgatacttttcaaaaatagaatttaaaacagattcatcattttcttgtacaagtgcaataatagctacttcgccatttgtcaacttattactaacggttgtaattaataccgaattggccaattctttgtctgaaccaacggaggcgccaattgctccaccagcagcaaaaccaaagagaacacctagtggtccacctaaaattccgattaaactaccaattaatccgccttcgaaataatcatctcctagggaatccatcaaatcaaagctatctttgacgttaacaacaccattttcagcttttacaattgaagcctgagctaattttgtattttcagtttgaccaaactgttttaattctgaaaaggcctgaaaggcttcactttcaatatcaaaaattgagacaacaacattttccatgggcttacactcctttattactttatagagatagaataaaatctcctatatttagtagtacaaaatactgctacacaaggtgaattatagcatacaataatcttttatgtaatatacaatattttacaaagagattgaggttttattacaaaacttatattctataaattagacaactttaaaattttgattaaaaagaaagatttggatagagctgttggtagacttaggaaattttaagaacatgcattagttaaactcaaaatacaagaaaagcctaaaaagactatactgtaagtgacaaaacaaaacaggaggatagtccaaatgagccacttacattagtcctgtgaaatacagaactaaatccttcacttaaattacttgtctaactttttggggtcagtacaaacagtgctttttttgttgaaatcgcaaagaatctaagctttctttttgcagataacattcgctcttttattttcagtatgattgagtcgatgccccgttctcgaccggtttttattgcaacttatcgaatgctagagcactatgccatcactttttggaagaatacttggagcaattctacgcagaatggaatgcgaaaaagtgataattaaagagacgaaaaagctgagaatatgatttcccagcttttttgaatgcgatagaaatagcaactagactatttacgaaaggcctcaataatgtagttgaagccagtaactaaaaatgaaaaggcaatgacataaacgacaaagacacctgtagccactggattgaacagaatcactagacctagtaaaaattcaagcaaggctacccacatgatattgctaccaataatagggaaaatcaatcctagacgattgcctttaaagaaagcaataatggcttctacaattaaccaaattcctacaatggtcggaatgacgaccggcagggtcacaaagccataagcaacgaggtaaagagctaagagaagactaacaaatccttggaaaagataaacaggtgagcgaagctcttttggtgcagagaaatagcctaaaatagctgctatagaagaaaccagtaaaccaaatgaaatccaccagctgtaagcaacaagattagctactgggtttgtaaataggaaaagtcctaaaaggacaaaaacaactcctgcaaggaatagcagtaaacgattagaaaatttcatttcaacaccccctatatagtatagttttctaataaaactattgtacttatttttatagaaaatgtcaataaaataaataaacaatttggaagtttcagtctgacttacaaaaagaaaaggagttttcactccttttcacagattgaagacaaagtccttataaaagtgtcttctaaagattttaacttcaatctgaagcgaggttatcctcgctttttctatttatcaaacaattccttattttcaattaagagttctagtggagatttatcccttgcttcaataaaaccaggttcatattggttatgaagtgttcttttctgagaagttggatcaatatacaactcatctccatcttctgtgtatagttggttgcctcttgttaagtaaagtaaatcctctaagtactgtccatcagtttctagaaaatcttcgatgtatttgacagcttttaaaatttcacttactttatcagagtattcattcgattcaagaacactcttttctaattcaatctctttactagttccaaatagttgggttggagttgcatcaaaatattctgctatcttatctaaatttgcaaaggtaggatagcttttttgtttttcgtagtcagagacggactgtttaccgattcctaaatcttctgcaagttgagtttgacttactcctttttctatgcgtagtcgtgccaaattgggtccaaaattttgaataataaaggtcatgataaactcctgtgttttatttttaacttattctatcacctataaacttacaaatcaagtttttagttgactacccaaaataatttttataaaatatatttataacttgtaaataagttataaatgatacaaaatagttcataagtttaggaatagtgagtgaggaggaagttgaggacgagactatgacttatgactattcgaagccttggtgctagaaattgtgtggacaagggcaaaggacgagcctgacgggaagtcaggcgaagtcccgaagactgccgtccagacaatttctagccaagcaaaagctggctattctaacagccagcaaaaagggacacttaggacaacgtccaaagaacgacggaacgagcaaacgttgatttgacagtgtttctgagacctaaaaaatctaaaagaagggaggacaattttgttggtttctatacaagatttaagaagcattcaagaacgatgtgaaataggagaattagtacagaggttagatgtcagtattgatagattaacggttatctgggatacagacactggttccctaagacgaattttcaaaaatctgaaacaggcaataagtacaaaagttgactcatttgaaatatatgataatgttcgagatgatgtctttactttagctaaagtttttaatgagtatgattcgatcaatattatattttttcaattatccacttatggaggtgaacaattaattcgaattgatttcaatcctaatactttaaaagaatttgatggaatgaaagtatggaggcaattaatgtattttgccagattgaattcattgatggtacgtttgtctcgttttgatttagcatttgacattttcaacaggcctgatatcgttaatttgcaacatattaaaggtggtgttacccataaggtcttctatggtcgagggggcgaattagagacgaaatattggggttctaacggtagtaatgtacaagttaggttatatgataagaataaagaaatcattgctcacaagcgcgaagagaagctagatttggctgtaaatccgttttggtggagactggagttccaactcagaaccaaagcgattggtgaggagatggtccaagatattatgaatcgacttgataatttcggattttataagctagaacatattcgagtagagcaaagagcatttacaattatctttctcaacaatcctgaactgttatcattggcttttccaaatttaaaatcagacagcatcaaaaagaaaaaaacaagagtccgcaaactattgagagaagaaacgaaccaatttgcggaagaattaaaagaagtattaatacagaatctccctaaattaaatacagaattacaactacttgtaggtgagtttctgaatttagaaaataaataaggaggataactatggacaataatttaattagtaacaaagaattaattgaaatgggctatcgccctcatacagcgaatgatatcattcatcaggcaagagaattacttgtatcacgaggctatacattttataatcgcaaacgtttgatggttgttccaaaaagtgttgtaaatgagattctaggaacagaggtggcgtaatatggcaagtgttcgttatcgaaagcgaggagatagcaacttatggacctatgaaattcgtaacgaaggaaagactgttgctcataatagcggttttaaaacaaaaaagcttgcagagtcagaagctgaaccgattctgcaagaacttcgtttagggaaaagaatttctagagatatttctcttgtagatctatatcaagaatggcttgaactaaaaattctaccgagtagcaggtcggaagagacaaagaaaaaatatcttctccgtaaaaacacaattgaaagattatttggaaataaaaaagtcactcaaattcgtgcgagtgaataccaaagaataatgaataagtatgggcaaacagttggtagaaattttcttggtagattgaatactggaatccatcagagcatccaaatggcaattgccgacaaagttctaatagatgattttacacaacatgtcgagttattttcatccaaagaacaacagatgaccgaagagaaatatttgcatacagaaaaggactatctggatttacttttagcagtaaagagaaaatttgattaccaacgatcaattgttccttatatcgtctattttctattaaaaacagggatgaggtttggagagttaatagcgttaacttggaatgaagttgactttgacagaggactgttaaaaacatatagaaggtttaataccctttctcataaatttgtccctccaaaaaacaaaacgtctattcgtatggtaccgatagacgaagaatgtattaagatattacaagtcctaaaaattgaacaagagaaggctaataaagagctaggtatcaagaacaggtataaaatgatttttcagcattatggatatattcatatggtaccagatattgctagtgtcaataaagctttgagtgttcttttaaatgaattagatatttatccaattatcacgacaaaaggagcacgtcatacctatggaagttacctctggcacaaaggatttgaccttggggttattgcaaaaattctagggcatagagatatttcaatgttagtagaagtatatggacacactttagaggagaaaatttttgaggaatttaatcaaatcaaagatgtctggaaagattgctcataaaaaaatatggggcaaatgatggggcaaatcagttatagacaagcaaaaaagccttttaaatcaaggctttttcttctgtatttctatgccccctacagggctcgaacctgtgacccatggattaagagtccactgctctaccaactgagctaaggaggctggatgctgtattggtaccgatgatccacggtttgtattgaacccgcgacgtaaaaaagcaggtgggcgactcgctactaacttcagttgcttctgggtgagccagcctgcacactgttaatagacctctgtctcccgataatacaaaaattagtcggtcaacacttatatgtggattcgtataccacagcaatttctatgtttttataataccacttttgaaaattattgcaagaggaaaaaacaatttttttgcaatcgttttcgttgattcctctcgtattacctagataacttatcaatccgttctttattagctccaagagctctttcatatttcccggtttcattgggttggaaataatttacacctcttaatttatctggaaggtattgttgcttgacccacttttcaggataagcatggggatacttgtaatcttgtgcattgcccagttccttgcttccagcatagtgtccatctctcaaatgacgaggaataggtaaattccctgattttctaaggtctgccaaggcagcatccatagccatataagccgaattcgacttaggagataaagctaagtcaacaactacattggcaatcaaaatacgcgcctctgggaaacctactttctgtgcagcttccaaagctgtaaccgtgtgaacttgcgcatcaggattagctaaaccaatatcctcgtacgcaatcacagtcaagcgccgtgctagactagggagatctcctgcttcaaccaaacgtgctgcatagtgaagactggcattaacatcagagcctcgaatagatttttgcaaagcagaaagcacatcatagtgtccatcaccgtctttatccatggtgatatagctacgttgtaaactattttccactgtatctaaagtaatatggcgaagcccatcttctgaagctggtgtcgacatgacagctaaatctaaggaattataagccgaacgtaaatcaccattagtagccgtagcaataaaatctagagcatcctcatctaactggacatcaaagtcaaagccacgctccttgtcctctagaacacctaggatagcttccttaatatcctcgttagagagtggttccaactcaaatatttgtacacgactacggatggctggtgtgacagaaaaaaacggattctccgttgtagccccaatcatgataatattgccattctctaagagtggcaataaaaagtcttgtttagctttatccaaacgatgaatctcgtctagaagcataactaagccacctgaaaatttagcctcttccgcaatttcctgcaggcgtttcttgctatcaacagtagcattaaaggttctaaaagcaaattttgttgttcctgcaatagcactagctattgaggtcttcccgattcctggtggtccgtagagaatcattgacgacagcatattcgcttctaccatacggcgaataattttaccttcaccaaccaaatgcttctgaccaatcacctctgaaattgtacgtggacgcatgcgtagagcaagattatctggcatcttctctcctttttcaactgattttttcttattataataagcatatactattttgttataaaaagaaattataaatagttcttgtcaaacctaaattcttatgatagaatgttttggtatgtggtgctagcacatccgtaataaattctacctaggaggaaaacacgaaatggctaaagtatgttactttacaggacgtaaaactgtttctggaaacaaccgttcacacgctatgaacaaaactaaacgtgccgttaaacctaaccttcaaaaagttactatccttgttgatggtaaacctaaaaaagtttgggcttcagctcgtgcgcttaaatctggtaaagttgaacgcgtttaatcttattggatattaagagagatgactccagtcgtctctttttttgttcatcgtctttcccttttggctatacttatgttataataaagaactaacagataattcttatagaaagaaggtgtcagtatgggatttacagatgaaactgttcgtttcaacctagacgacggtagcaaagatgaaatcagtaatactttgacaaatgtctaccgttcgttggctgagaaaggttataatcctatcaaccaaattgtcggttatgttctgagcggtgaccctgcttatgttccgcgttataatgacgcccgtaaccagattcgtaaatacgaacgtgatgaaatcgttgaagaactcgttcgctattatcttaaaggaaatggaattgacctctaatgcgagtaatgggacttgatgttggctcaaaaacagtaggagttgcgattagtgatcccctcggttttacagcccaaggcgttgaaattatcaaaattgacgaggaggctgaagagtttggtttcgaccgactaggcgagctcgttaaagaatataaggtagaaaaatttgttgttggtcttcctaaaaatatgaataacactgaaggaccacgtgttgaggcaagcaaagcctatggtgacaaaatcaaggaaatctttggaattcctgtagattaccaagacgaacgcttgacaactgttcaagccgagcgtatgttggttgaacaagcagatgtcagccgtggtaaacgtaaaaaagttattgataaattagctgcccaacttattctacaaaactacctcgatcgaatgttttaagaaagtgtaatagagacctaatagtcaagtgacaatctagtaaactgccaagcaaatctactagatttcctcactattcagtgctctctacaaaaaggagaacaatatgtcacacaatcacgaccacaaccatgatcatgaagtcatcactttagtagacgaacaaggaaatgaaacactttttgaaatcttgttgactattgatggacgcgaagaatttggtaaaaactatgttcttttggtaccagctggtgctgaagaagatgctaacggagaaattgaaatccaagcatactcattcactgaaaatgaagacggtactgaaggcgaccttcaaccaatccctgaagattcagatgctgaatgggatatgattgaagaagttttcaatagcttcatcgacgaaaactaaaaatattcaatgccataggcaaagaaatgacttgttaaaaagagattgggatattgtatctcagtctcttttttagatattattttcttaaatgtaagaaattagaggaaaattgactaaatggtattatctgatatactttaaataagacaattaggggataagacccttttatttataactttccaaatgtcaacaaaggagtttaattgtgagtccatataacgaagacaatactttagattcaagtggctaccaaggttatcatcgaagccaccatcgctctcatacacaagataatcaatccgaaaagattgaagtgacaattcagggacatacagaagaatcaaattcgtctcaaatagagaaaaaaactaaaatttcacttccatggaagcataaaggccatatcctgattctcagtttgattttgagtatttttagtatatcagtgccctgctttacagactttgccaataatatacagtctcaaaacctttacattgcaaaaatgtttgccaatggtagcttaccctactctgacttttttgcgacaggcggcttcttttattacttactagtttctctggctttccgtttaggatcaactctttggctgattcctattcaattccttagctactatctttctggaagttacctttacaagactgtcatgcacatgacaaataagaaggaaattgccactctaattagtattattttctatgttactaatggaacacttggttttggagggctctaccctatccaatttgctatgccttttgtcctaggtgccatcttcttcttaactcgttactttgcgggtcacagtcgtgatgaagcctttattctttacggcttcgctggcactgcgggagctctttttgaagctcgaactcttattttctggatattgtcacttgtgacaatcttcgtttacaaccttgtcaacaagcactttgctcgtggtttttatcaagttctttgtattatttttggtaacattctagtattgtatctatgtctttactttatcctaaatttacaaattacatcggactatattaaccaagttttggtttacaactttacacaacttgctgtagaaaaaaatgactttctacttacgttagcttaccaaagttttgctgttataggctctggattacttattggtgcactgactacaagcaaccaccttcttggcgatgctaaagataagagtatcaagtgggtactactccttagttttatctttacagtggtttacagcttgttctctcaaagttttgggctttacagtattctcaacatcgtaccttatggtctagtcttgacagcactttctttagatgatgctattaaaaagagagcagagcgaacttctcaccgacgtcgtaatggtaaccagattcacacacttaaagtttttggtatattccttagtcgtaattacttcttacctattgcagtctttgcatttgctttcgcgatgccaatcattatgttcctatttaatttaggaaataatactgaacgtagtactgttgcaaattacctcgctaaaaatactaagaaggatgaaactatctacgtttacgattcatcagcaaaaatttatttggaaagcggtcgtaaagcagcctcacaatttgttcttccagaacttaacacagctaaatctagtcatcagaaagctctctcagatactattatccaagattcagcacaatatatcgttgtccaacaagatacacaactaccttctgatgttaaatctacactttcaaaaaactataaaaaagcccctgtaaaaggcgttgaacgatacactgtttacgtcctaaaataggtcgaaaaatcaatatatagtggttgagataaaaatataccacaatatattgatttttttttgcctagtgctataattagtaacgaggtgatttttagatgattacattagaaaaagaaaaggttacaatcaaccctgatatcaaagtcatcaaacgtgatggtcgtatggttgtctttgattcaagtaaaatatatgaggctatcctaaaagcaagtgaggctattacacctatcacacccttgattgaagcaaagttggagggaattgccaaccgtattgttgctgaaatcaatgaccgcttcactcaaaatatcaaaatatatgaaatccaaagcatagtagagcacgagttactcgaagctaacgaatatgctatcgctcaagaatatatcaactatcgtaccaaacgtgattttgaacgttctcaggctactgacatcaatttcaccattagtaaacttgttaataaagaccaggctgttgttcatgaaaatgctaataaagatagcgatctttacaatacacaacgtgatttaaccgcaggaattgtcggaaaatctgtaggacttaagatgcttcctccacacgtggcaaatgctcatcaaaagggagatatccatttccacgatttagactacagcccttacacacctatgaccaactgttgtttgattgacttcaaaggcatgttggcaaatggttttaaaattggtaacgctgaagttgaaagtcctaaatccattcaaactgcaacagcacaaatttcacaaatcatcgcaaatgttgcctctagtcaatatggtggctgtactgcagaccgtatcgatgagtttttagctccttacgcagaacttaactacaaaaaacacttagctgatgctaaagaatgggtagctgaagaaaaacgtgaagattatgcacgcgccaaaacgcgtaaagatatctacgatgctatgcaatctcttgaatacgagattaatacgcttttcacttcgaatggacaaactccctttacctctctcggtttcggtttagggacaaactggtttgagcgtgaaatccaaaaggctatcctacaagttcgtattttaggacttggctccgaacaccgtacagccattttccctaaactcatttttaccttaaaacgtggacttaacttagagcctagctcacctaactacgatattaagcaactagctcttgaatgtgcaacaaagcgtatgtatccagatgtcttatcatatgacaaaatcattgaattgacaggttcctttaaggctcctatgggatgtcgttccttcctacaagggtggaaggatgaatgtggtgttgaagttaattctggacgaatgaatctgggtgttgtaacccttaatcttcctagaattgccctagaatctaagggagaccaagacaaattttgggaaatttttgaagaaagaatgagaattgccaaagatgcactcgtctaccgagttgaacgtgtcaaagaagctacacctgctaatgcacctatcctttatcagtatggggcatttggccaacgtttaggtaaattcgacaatgtagatcaactcttcaaacatcgtcgtgcaactgtatcacttggctatattgggctttatgaagtagcatctgttttttatggtagtgactgggagactaatccagaagccaaagcgttcacgttagatatcgttaaatctatgaaaaatgcttgtgaaagttggtctgacgaatatgattatcatttctctgtttattcaacaccatcagagagtttgacggatcgtttctgtcgtttggatactgaaaagttcggtgtcgtgactgatatcacagataaagagtattacaccaactctttccactacgatgttcgtaaaaatccaacaccatttgaaaaattagaattcgaaaaagcatacccagaagctggcgcaactggtggattcatccattactgcgaatatccagtcctccagcaaaatccaaaggcactcgaggctgtctgggactttgcttatgaccgtgtcggttacctcggaacgaatactccaattgataaatgctacaagtgtgactttgaaggggacttcaccccaacagaacgtggattcatgtgtcctaactgtggcaacacagatcctaaaacagttgatgttgtcaaacgtacttgcggctatctaggaaacccacaggcacgcccaatggttaaaggacgccacaaagaaatctctgctcgggtcaaacacatgaacggttcaaccataaaatatgaaggtaaacacctttaataagacctagaatacattataataaactagaagcagctggatgataccttccaactgctttgcttatttcatttttagaaaggaatataatgggaaaatatcaattagattataaaggtatgcaacaagtggaacgttaccacgaaaaaaatgcaaccgtcaaaaacgataaaaaagcacgtgtccaagcccttttgaaaaaagctggaaagaagaaataatatgatcttacgccgaccgagtcaaacagataaagaagctatcttagagatgatggctgaatttgaaagggagcaatctgctcatgatggtggattttggaaccccgacaattttgtttatgaagagtggctggaagaaaatattcaagcggaagcgggactcaatattcctgaaaactgggttcctgctacccagctggttagttttgacgaagcggatcatgctcttggtttcctcaaccttcgtctccgattaaatgactacttactagaaaaagggggccatattggctactctatccgtccatccaaacgaggaaagggttatgcgaaagaatcactccgtcaaggcttacaagtagctaaagacaagaatattcatcgtgctctggtcacttgtagtatcaagaatcctgctagtcgagctgttatattagccaacggtggccagttggaggacattcgccatgaaactgagcgctattggatagatttggagtagaatcatgacatggaatacaccaaaaccacaggaatggaagtctgaagaacttagccaaggacgtattattgactacaaagcttttaatttcgttgatggtgaaggcgtgcgtaactccctttacgtctctggttgcatgtttcattgcgagggatgctataacgctgccacctggtcctttaaggcaggaattccctatactaaagaacttgaagaacaaatcatgagggatctagctcaaccttacgtacaaggtcttacgctacttggtggtgaacccttcctaaacacaggaattctcattcccctagtcaaacgcattcgtgaggaactcccggaaaaagatatctggtcttggactggttatacttgggaggagttgatgcttgaaactcctgataaactagaacttcttcaactcgttgacattctcgttgacggccgctttgacatcactaaaaagaaccttatgctccagtttcgaggatcatctaatcaacgtattattgatgtcaaaaaatctcttaatcaaggagaagtcgttatttgggacaagctaaatgacggtcaaacgaactatgaacaagtcgatcgtaaagatatgctataaaaaaagtctgagcttataactcagacttttttatgcaattttaacaaaaactagctcattattagaggataaatcctcacgataattaaactcatcaaaagacaattttcgtaaatcattaaccgtttgacaattctcctccataacagctgtcaaaaaagcccctcttgcctttttggaaatcgtagagtgagtcttaagaaccccattgcggtcttccataaaactaaccgtgaataactgcttacgaagagttggactaaaaacatcctcgaattcactcgaaagcaaagaaacaactggaacttgactctcctctaaaaattggtcatattcggcacgccaatagttttttaaggactgaccatcaacctttatcttcgtatgaaagtcatgacgatgttcttggatcgggtaaaaagcgggaatgattccataaaaagaagatgtgataaacacttgttgacctaagaaatctttttcacatgtggataagtcactacgtttgatgtgacgatacatcagaccattaaaaagctcgacagccggatagctcttcgcttctcccgacaaaatcgcagcccagcgctgcttttctttctcagcctgctcaggctttattttataagctgtggataattcatctgtagacaattttgacatttcagttaggatagccgcactcttttcggataatttttgagacgaaacttccttactggccttcatttcttttgcggttggaattaaaaatctaatcatattgatattgtaaagtcaagcaggcatttcgtcaagaattctctccaacaaaaaagaagctaacattcgtcaacttccttttttgttagtcatctaaatcaacaaaacgacctagaatatgtacattttctgcgatggagacaaaggctttgggatctgcctttctcatataatgcttgaagtcagtatactcttcacgcgtaataatcgccagtaatactgctttcttttcgtgattataagtcccttccgcatcattaatcatcgttactccacggtggagttttttctgaatcatccttacaactgggtcgggattacttgtgacaatcatagcctgcattttcttttgtttcgtgaaaatcgcatctgtaactcgactagaaacaaaaatagtcaccattgaataaagagcatatttccaaccaaaaagaatgcccgcaaaaaccatgataatcccattgacaatcaaggagatattcccaacatcacggcctgttttcttacgaatagtgaggctaacgatatccgtccctccactagagatacgtgattttaaaccgaaaccaattcccgttcccatgaccaaaccaccaaagatagcattgatcaaaggatcctctgtcaaggttacatgtggcatcacctgaataaaaagggagctcatcgttactgtaatgaaagtaaagattgtaaatttatggccaatcttataccaagccagaatcaagagagggatattaattgcatagaaagtcaatgatactggtatctcaaagcctaaagttctaacactcaatgccgataaaacctgtgccaaacctgttgctccactggagtaaacatgtccaggttgaaaaaagaaattaacggcgattgacgataagagcccgtaaagtaaagaagctgaaactttttcagtatatttttcacgggaaatactacgtgcagcctgcaaaacgcccattttcttcgcagactttttcgctacaaatttaacatgtttatgaagaggtgctttattcattttctaaatctacatgaagggcaagttcttccaactgtttatcagccacaagacttggagcctgagtcataggatctgatgccttattatttttagggaaggcaatcacttcacggatattatctttacctgcaagaagcataacaaaacggtcaagaccgatagccaaaccaccatgtggtgggaaaccatagtccatagcttcaagaaggaatccaaattgctcataggctgattcttcagagaaaccaagggctttcaacatacgttcctgtagttctttatgattgatacgtagactacccccaccaagctcataaccattcaagacaatatcataagctacagcacgtaccttggaaagatctccttcaagctctgctgcagaatcttctgttggcaaagtaaatgggtggtgagcagacatatagcgtccctcttcttcagaccactcaaacattggccaatcgacaacccaaaggaagttgaacttagtgttgtcaatcatgtcaagttctttagcaatttgattacgcaaagcaccaagtgtgttattagcgatttcaagtgtatctgctacaaaaagaactagatcattctcttcaaggtgtaaagcatctgtcaacttatcttcaatacttgtcaagaatttagcaactggacctgctagagctccgtcagtcatcttaacccaagcaagacctttagcgccaaattgtttggcaaactctgtcaacttgtcaatacttttacgtgagtatttgtctgcatttcctttgacaacaattgccttaacagctggtgcctcagcaaacactttgaagtctacacccttgacaacctctgtcaagtcttgtaaaagcatgtcaaagcgtgtatctggcttgtcagaaccatagttattcatggcatcatcataagacatgcgtgggaatggtaatgtaacttcaatccctttagtttctttcataaccttagcaatcaatccctctgtaatatcttggatttcttgctcattaaggaaagaggtttccaagtcaacttgtgtaaactcaggttgacggtctccacgcaaatcttcatcacggaaacacttaacaatttgataataacggtcaaaaccagcattcatcaataattgtttagtgatttgaggactttgcggaagagcataaaagtgaccttggctaacacggcttggaaccaagtaatcacgagcaccttctggtgtagattttgtcaacattggtgtttcaacatcgataaattccaagtcatcaagataatttcggatggcgtgagttacctttgcacggagcttaaagttttccaacatctctggacgacgaagatccaagtagcggtaacgcatacgtgtatcatcactagcctcaacaccatctttaatttcaaatggcgttgttttggcagtattaaggactttaagattttcaactttaagttcgacagcacctgtaggcaagttatcattagcttgttcacgcgcttcaacaattcctgttacttcaataacaaattcgctacgcaagctttcagctgtttcaacaacattagcatccgcattttcagggttaacaaccaactgcatcaaaccttcacggtcacgaagatcgatgaaaatcaaacctccgaggttacgacggcgagatacccaacctttcaaagtaatagtagttccgatgtgttcactacgaacacgtccggcatacatagaacgttccataaatacacttctttcgttaattttttagtcttaactattatagcaaaaagcccatcaaaaccccacccatttcaggttagaattttaatagactttcttttttataaaactatttgccaaattgtttcaacaaatcactagtatccacgtaatcttcagcaaactcttcaaaatcttcaaaacgataatcagctgtttctaagtcaagtaaactattccaacggaatccgtaaacatcttcaatgataacactaagttcatcagtttcctcgtctacctgccatcccaaataacgttcctgtgtttcaaaactcaagaccacatcttgacaatcttgacgccaaacctgaccaagtaattgctgacacatcgcatgatcacttgcaggctcatcattgaaccaagtaatgtcatgtttatcaagaaaggtaatcaactgccaaaactgttgctggaaacgaattggcatattacgatcaaaagccaaactgaacttttcactccgtttgagcatatcaactatactaaccatatgccccctacttttctaactgtttgaggactgctgcaaagttgttagttagctcttcgaaacttacagtaacttcctcacgagtagcattatttttgacattaacctgacctgactccacttcactctcacctaatgtgataaccgtcttggccttgaaggtatctgctgacttaaattgtgccttaatcttacgtccaaggtaatcacgttcagccttaaatccttgatagcggatagcttgaactaactcaagagctttgccattggcacctgaaccaagtactgcaatgtaaacatccagattttcttccactggaagctcaataccttgtttatcaagaaccaaaagcaagcgttctaaaccaagtccaaaaccaaaaccagctgtttctggaccaccgaagtattcaaccaaactatcgtaacgaccgcctgcacaaattgtcaattcagacttatcaatagtggtaataaattcaaaaatcgtgtgattatagtaatcaagaccacgtaccatattagtatcaatcacgtaaggaatgttaagactatcgagcatggtacgtacttcgtcaaagtgcgcttgactttcttcatctaaataatcaaggatagagggagcattttcaactgcaaccttatcttctttttcttttgaatcgagtactcgcaaaggattttcatccaaacggcgttgactatcttttgacaaactttcacgcatcggtgtcaagtagtcaatcaaggcctgacgataagccagacgactctcagtatttccaaggctattcaaatgaagggtaacatccttaatgccaagcgtattaaagagttggtaggccatagcaatggtttcaacatctgttgcaggattttttgatccaaagcactctacacctagttggtggaactcgcgcaagcgtcctgcttgaggacgttcataacggaacattgatccaatataataaactttaacaggtttttggacctctggcgcaaagagtttgttttctacataagagcgtacaaccggtgctgttccttctggacgaagtgtaatatgacggtctcccttatcatgaaaatcatacatttccttagtaacgatgtcagttgtatcacctactgaacgtgaaatgacctcgtaatgttcaaacataggtgtacgaatttcaccataattgtatttcttaaatgtttcacgtgcaacattttctacgtactgccatttggcactatccgcaggtaaaatatcctgcgttcccttaggtttttgaagtttcataatgatgatacaggcctcagatagacctgccctccttttccgttattacagatataatcactctattctatcataatttatatagcttttgggaaatggtggaggatttttcaacgtaagaaagaaacagacctctcggcctgccacaatcattaatcttccttataaagaatgaaggtcacaatgaaagataccacaacagaaattacaagacctgcaatagctgtgtaaaaatatttaagtatatcttcaccaatatacgcagcaatcgtcaagatacccggggaaccacccgcaaaatttctcgcacctaaaataccaaggaagaagccacctactccccctgcaacaatagatcctataagggctgctttattttgcaaagttaccccataaagagccggttccgtaatcccacaaatcgcagtaatcccagcagatgaagctagagctttttattggtatccttagtttttaaagcaatagcaagagctgctccaccctgagccacatttgaagccaaagcacctggctgtgcaatcgtatcataaccaatagtcatacggttattgattccaatggatactaagccatagtgagttcctgttgtaaccattaacgggaaggttgctcctacaattgtcggaacaacccatgggccaaagttttccaaccacttaaagaagtcacccaaccagttaccaatgacagcaccaattggacctaaaatcaaaagtgttacgattgcagtaattaaggtcgtaatcataggaaccaagaaaaacttcacagcctttggtgaaattttaatcgcaaagcgctccacgtcactcataaaccaaactgccaaaataacagggataaccgttgatgagtaagaagttaatgtaagaggaatactaaagaaagagacgccatgacctgattccttggcagttgtcacaatctgagtaaaagttgggtgtaataaaatagcaccaatcaacatccccaattgagcattcgtcttaaactgtcgagctgctgaggcacctaaaaatacaggtaagaaataaaatccagcatcgccaataaaattaagaacttgataattaacatcatctacagctactaccttaaagacaaccaaaagggacaaaacggccttgatcatccctgctgctgtaattactgtaagattggggtgaaaatcccagaaataagagctaaaaagctttgaagaggagttctatcttgtttttccgatgattccttagatatttcatccagattcaataaaccttctaaagcgcggtatacatttggtacatcactcccaacaacaacttgatactggccaccactcttagccaaactcaccacaccatcgatagctttaacagcctcatcatcagctttagaatcatctgctaaggtaaagcgtaaacgtgtcgcacaatgggttagattatgaacgttcttctttcctcctacagcttctaaaattttctgtcctatctctttataattcatgacacttcctttctatattcataaaaaaagagaacaagctgaacctgtcctctgcattttttctattatgaccaaactttatcagtaattgttttaatcaatttcaatttattccactcatcttgctcagtcaagatattaccttcttcagttgaggcaaaaccacattgagttgagataccaaggttcttaagtggtacaagctcagccgcttcatggatacgagcaatgacagcatctacatcttccaaagctggattcttagaagtaatcacaccaagtaccaattcaacatggtcacggttattccaaatcgttggaagtggtgcgaagctacctgaacgcgcatcatcgtattccaagaagaagatatcatagttcaattgaccaagatatttagctactgaatcatagccaccttcaaaaagataagttgacttaaagttcccacgacaaatgtgagtagccaaagtcaaatcctctggaagaccttccaaggctttattgatagtgtacacatcatactcagcaatttttgccaactcagctgttttctcaggattatttttttcattctcaaactgttgaatcaaataaccccaagtcgtatcatccaattgtacataacgtgcacccaaatcgtagaaatgttggatggtatcatggtaagctttagccaaatcatcaaggaaatctgtccatgaatcatagtaatcagcataaagatcactacggtggtcacggttaatgatgagtgatggacttggaatagttacttttggagtaattccttcaggagtcactgatttaagatattcaaagtcacgatagaaaggatgattaggattttcagcaattttaccattgatacgaacgttagttgtacgtgtcttagctccatggaatttatatgaatcctcttgttggtaagcttcaaaaccagttaggttccataggaagtcaaggtgccaccaagaacgaccaaattcaccatcagaaacgacttgaaggccattttctacctcatgatgaaccaattccttaaccaattcatcttgtactttcaacaattcctcttgcgaaatctcaccattggcaaatttttcacgtgcttcttttaatgcttgtggacgaaggtaagaaccaacatgatcaaaatgataatgacctttactcatagttatttactcctttttattctttcatttaatgtaataataagcctattctagcacttgctgttatagctgtgaaatatgtatttactatcacattatatagtttttaactatatattttcttgagaagtttttttgtcaagtaactttactttacaaaaaagatatgttattctgttatagttgatttaaaatcaagaacataaatattaattcggaggaaataaagaaatggcagtacctgcacgtcacacttcaaaagcgaagaaaaacaaacgtcgtacacactacaaattgactgctccatcagtacaatttgacgaaacaactggagattactcacgttcacaccgtgtatcacttaaaggatactacaaaggacgtaaaatcgctaaagctaacgcagctaaataatagaagggagataccatgcgcgtaaatattacacttgaacacaaagaatctggtgaacgcttgtaccttacttcaaaaaacaaacgtaacactccagaccgtcttcaattgaaaaaatactcaccaaaattgcgtaaacacgtaatctttactgaggtaaaataaggattcaatacgaatcaatacaaaagaaaaacgctgatttcaagcgttttttctttttgtcaattgcagtttattgcactgtatttcaattcaaactctacctttttctctacctttttatcgtaaaatctgattggacacggtttgtgtccaagtgatttataaatagctttatatcaacctttagcaaggttgtacaacttattcataaaaaataaatagatctgattgaatgagatctttcatttttctgtcaattaagcaaattaaattgaccaaataaattgttgatatataaaaaattaagtaagtgtattacaaagatagtcttctttatttatagtgctataatgaatctattagcttatttatgatagaggtatcgttattgatcaatccagaattttacaaaacacttgcaaaaatattctgtggggatgaaacagaattatttacctataaaactggcccacagttagtagacttttttaatagctatttcggttttagtgatgtttaccgtcaagggttcccaacaagatgggtttatgtaaatgataaattactaagtttctctgaaactggtaaacttgatctttttttcagcattatattgagcaaacaatatcttttaacagaacgtcaaaaaggtgaagttgattctttagaataccaacaaaaggttttaacggaattaaataaagtctgctcaatttattcattgtatttgtcaaaaaaaggcaatgaattcttcttagtagaaaccgatcaagatttagtagaaatcggaaaaggtggatttgcagatatttttctacaaaaatctacaggattagtattaaaaaaattaaatgaagactcggttagacatgaatcgctaagaagtcgatttcgtagagagtttgaaattacaaaatcatgttcagatattgaaagtattataaatgtatatgactttaatatcgataattattcctacacaatggaaaaagcggattttactttagctaattatattaaagaaagcgaattaccagatgaatcaaaatttaatattttacggcaaatacttcacactatatctctagtgcataaacgaggaattttgcacagggatctaagccctactaatattttcttcataaacggaataataaaagtagcggattttggtttaggaaaaaatattaacatcttaacctcgcatcaaactatagataccgcatcttttggacagcttttttattgtgcaccagaacaactaactcttctaaaagaggctgacaaaagtagtgatgtatactctctcgggagaattatcaattttgttatgactggagatcctaataatttttcgcataccctgcgttcaatcagtacaaaagctaccaatatcgatcctaattataggtatgaaaatgcaacagatatgttgaacgggttgaattcatggttaagaataagaagtcatgaatcttttaaagaaaaaatctgggaaaaaattaatcaaggtatttttgataacgacatagaaaactatatttatgaaatgtcagaaaaagatctctgcctatcttgtatcaataaaggaactcgctttaccgaatgcttacttagctttatgaatttggatgactctcacgcaacttatataattcagaagattgattctaactatgtgcaatatatcaaacgatttgaagatgcagacccttttgctagcctagcttatgaaattttaaaaggacatttttcttataatgttaacgaagtggctgcttatatattaaaatacgtagcttatgacattattcgtttcaatgcacaacataagatagaaaggttaattaacaaaggggtagaaccattaatcgagacaatactagaaagataaaaaatgtcagaataaagtgtaactgtccgaaaaatatgtcttttcccgaaagtttattatttgctgttataatagacatgcaaaacttgttccaagaattttttaggcttgttatcatcataaatactgattttaagggatttaactactagtaaacttaacaacttttatatattttacacaatataggacagtaaatggacagtgacagcataattgaagagtgaacaaaaagaggtataaaaatacctctttcagattgaagacaaagtcctcagaagttatacttctggggacttttcttgcttcgaaggagtataataaaagaaaaggtatttgatgaggtactcctatgtttcacaaagataatcctgaatacaatcgtcgtcaagtaggtttatatactcttgatgaacttgtgcctaaagaccattttttaagaaaagttgaagaaacgattgattttacttttatttatgatcttgtcgaagatagttatttctccgataatggtcgtcctagtctagaccctgtcctgttagttaagattcctttgattcaatgtttttatggcattcgttctatgcgccaaaccatcaaggacatcgaggtgaatacggcttatcgttggtttcttggcttatctctggacgataaggtgccacattttacaacttacggtaagaactatagccgacgctttcaaaataaagaattattagcacacatttttagtcatgtgcttcatcaagttttggaggctgggcttattgatccctcagaaatcttcatcgatgggacacatatcaaggcagctgctaataatcataagtacaaaaatgttgtcgttaatcaaaaagctaaattcatgagtgaacaactggacattgaaattaatttagacaggaagaaacatgcaaaaaaggcgaggccaaacctaagaaacaatcaacgactgatccagatagtggttggtttcacaagggagaacacaaggaagtcttcgcttataatgctcaggtagcttgtgataaacatggttgggccttggcttatacagttgaagcaggtaacatccatgatagtcaggccttccctgctctgtttgccaagttagaacccttctcccctgaattcattattgcggattcaggctacaaaacacctagtattgccaagtttcttttagaaaaagagattacgccagtattcccttacactaggccaagaggtaagagaggctttctacgtcctaaagactttgtctatgacgagcattttgactgctatctttgtccagagaaccaggtattaacttaccgtacaacgacacgtgaaggttatagagaatataaaagtaatcccgaaatttgtaagacctgtcccttgttagcgatttgtactgaaagtcgccagcaccaaaaagttgttgtgcgtcatatttggaaagatgccttagaaatctgtgaagatatccgtcatcaaagtgggatgaaggaacggtaccaacaccggaaagaaacgatagaacgtttattcggaacagctaaagaatatcataacttgcgttataccagagaaaaaggaaagtccaaaatggaagataaggttgggcttactttggcatgtctaaatatcaaaaaattggtaaaaatgatggtagggaagacctgttattttatccaaatacctcaatattattggattatgggagaattaagtgtgaatataaaaaaagacaaacatcaaaaacgatgtttgtcttcattctgaatcagaattttaataggaattctgatttttttatgcaaatccatttaaaagccaaagggtgtttaattattatttattaaaatatagataaatatcatttgattagtatttgttaagtaggagtgcttaattcaaacgacctcattataatgcttatcacatacattaaaataataaaaaattgaaagaaggttgaaaaataaaaataacatgctataattatagcgtctatatgaatagggaacatgggtagtagtaactcgaagccaacctgtttgtaatattttgactcttttggggagagttgaatgattacttgttggtacttggtgctatgtgatatggtattgggatagggttatcataccgatgttttgatttgtaagatggggatagagcgtaagtaaaggggacgctctttaaaatggggagaagtttttatgaaatatatgtaaattagcaatactgctggattcaaaaacacttttattagcaaagcgttttttctcctgcagtttttttatttattaaatagtgtatttttaaattcgggggagaagactagaaaatctcaaaacaattgatatccttggatgatatgacttagttttcttgtcttacttcttgaattttatacgtaatgatagtctttttattgagacctttttctttatctactttacatcatttgcaaaacaagaccaatagcgagggcattccctttaatgcttttggagaaaggataactcattttcctttttattggggataataaagtgataatgtagagtcttatttgtcaatattatattgatttcgtataggtcataggggggatcttatgggaaaattaaatattatggttgtctttgggacaagaccagaggcaattaagatggcgccgttaattctttagttgaaaaaacatcaagaaaccattaatactattacagtagtcacagctcaacaccgtcaaatgcttgaccaggttttggagacttttgaaatagttcctgattatgatttggatatcatgggaaaaaaatcaatcacttcaggaaattacttctaaaattttggctaattttgatccagttgttaagaaagaacaacctgatttggttttagttcatggtgatactacaacaacttttgctgctggattggttgcattttacaataaagtaagtattggtcacgttgaggctgggcttagaacttatgacaaatattcaccatatccagaggaaatgaatcgtcaggtgacggttgtgactaattctatccatcatgctgttaagctggtagatctcggtattagtactaggattattggtggtaaggttaaacattcaacagatgcctctattggaagtacagctctggaacaaatcagacaactgaattttgattgtgctttcattggtgctaatggagttgatgccaattatttcacaatgccagatatggaagaggcggtcattaaacgaacagtgatagctaatgcgcaaaaagcctatgttctagctgatgcttctaaacttggtcaggttacctatgctaaggtagccgaggttgagaaagtaaccataatcacaaatgcttcggaagaagggctccttaaataattaaaagagaaaacgagggttattgaagtatgatttatactgtgacgctaaacccatcaatcgacttcattgttcgtatcgacaaggtagagattggtgaagttaaccgtatagagagtgatgataaattcgctggcggtaagggtattaatgtcagccgtattctacaacgtttaggaattgacaatactgctacgggcttcatcggtggttttacaggacgttttgttacagacagtttggatgctgaaggtattaaaactacttagaatggtgaagctgtaatggtattaggaaaagtaagtgattttttaatcaagcatcaaagattgttaacgtacttaagtatttttgctgcgttaatgttattaatgcgcttagtgtatgatgatgttttgattgatcatgataatcccatcgttttagcaatctttataggaatactagttctttggaccctagcatcttaccttaatcgaagacagcatatgctatcccactttatcttacagagttcgaaacttattaacgtctatgctgtagacttagattatcgttttattgcggttaataagaatgatattcggctcatggaagaaatcttttatttcactcccaaaattggtgactttccaatgaattatcttaatagtgaagatgctgcgcgtttaaaagcaaatgttgatcgtgcgaaaaagggtgaaacatttatatttatggatactattaagacaggcgacaaaacgctttactggcaaaatatgtattctcccatttataacaatcgccaaaaagtgattggtgttttttgttttgttcttgatgttacagagcagagacttcatgaacttgaaatacagaggatggcatacgaagatgttttaacacgggttcataatcgacgatatattgagcttgcttttgaggaatgtctgacacgtaaagaagaacaaattacggttattatatctgatttggataaattcaaggaagcaaatgatacctttggacatgctacgggagataagattctaattgaatttggtgatattttaacgaagataatgcctgaaagtgctgtaatagcaaggttaggtggagatgaatttgcggttttactccctggagtttctgaaaatcaagctgaatttttaataaaacttgttcaagcagaaatgactctcaaagatatggggattacagcatctttaggtgcttatacggactcttatcaatcacataaaaacttcgttgatttttttgcaatagctgataagaaaatgtacgaaaataaaagtcagaaaggaaaatcaaatgtttgacattattctagtcgatgacggtagtggagctgattttgcaccgttatttgcaatagctgataagaaaatgtacgaaaataaaagtcagaaaggagaacgtcgatgatgtttcaagatgttgttattgtcattcctgcctatgaacctgatgaccgtttgttggaacttttgaaaaatattcgggataaggaaaatcaaatgtttgacattattctagtcgatgacggtagtggagctgattttgcaccgttatttgcaatagcgcagagtaactatgcttgtcatttgcaaagacacgctgataataaaggaaaaggtcgtgctttaaaaacggctatttcatatattttggacaattttcctaatgccaaaggaattgtgacgattgattctgatggtcaacatacctacgaagacatgatgaaatgtttggctgaatttttgcaacatcctgatagtttggtgctgggtgttagaagatttgaaaaatctgttcctttacgtagtaaatttggaaatttattgacaagagacgtcttgggggctatgacaggtatgaacgtttctgatacgcaaacggggcttcgtgtgattcctatgtcatggttgccaaaactcttaaccgtggagggtgaacggtatgaatttgagatgaatatgttacttgaggcaaaagaggacaatattctgatttgtgaagttggcattgcaacgatttatttggatgaaaatcagtcgtcgcattttgatgcgattcgtgactcgattagaatttacaaggttttcttcaagtacattttttcagcattgttttccttcttggttgatattgttgcttttacgattttaatttctttgtttaatggattgagttttagtgcggtgacgttagcttcgattttagcgcgtgcgatatcatctgttgttaatttcaccttgaatcataaggtggtctttaaacgaggtcaatcaaatagtgcgataaaatacttcactttggtggtagtacagattgttttgtcaagtttattggtaacagttctaggaaatgccttgacgacgctgccaatttcattggtgaagattttagttgacggtacacttttctttgtcagttattttgtgcaaaaacatttgatttttagtggaggcgagaatgaaggctaataagaggatactctatttcgttgcatttgtaacgactgccttttatttaacttggcgtttggtggcgactattccgtggcatgattcatggtttgcgctgatctttgggattttattgtggggaagtgaggtagtttcagccattacaggctacattctcatttggaataagcaaaaggactttgaacttgaaaagcctgagattgctaaggagcgttacccagatgtagatgttttgattgcaacgcataatgaggatccagagttgctttataagacgattaatgcctgtacttttatggaatatcctgataagtctaaggtgcatatctacatctgtgatgataccaatcgtctagaagttgccaaattggctgatgagcttggtgttggttattttggtttggcggataataaagatgccaaatcaggaaactacaataatgctttacgtcagacgtcatcacctttggtggcgacatttgatgcggatatgattccttatcgggaattcctgttggaaactgtgccttattttgttgaacaagttgaggcttatgaaaatggtgacgattatgataagtcaaaagttggtttgattcaaacgccacaaagtttttacaatgctgatattttccaatttaacttgttttcagaatcaaccttaccaaacgaacaagatttcttttccaaagaaattaatgtttgcaataattcgcacggtgcagcggtttatacggggtctaatacggttattttccgcaaggcgattgaagatgttggtggttttccgacagataccattacggaggatttcgagctaggtgttcggatgaatgcggctggttatgtaaattattcgacgaaaagtccaatggctagcgggttaacgccaacagatttgaagagtgtcatcaaacagcgcgcgcgctggggacgtggcgttattcgcagtagctacaatatgaatatcttctttaatcccaaattgacaaaggggcaaagaattgtttatattaatggctatctttattggtggtctttctttagacggttattgtatatcttggcaccgattttatatacggttttccatgtgcgtgtggtggtgtcaaatatctggctactgttcctattctggttgccaagttacgcattgacacacttgtcaatgcgagaagtctcaaaacaataccgaacacaggtttggggagaaattgtggaaacgatttttgctccgtatttgtttattcccatgatgttggagtcctttggcattagcgaaaaaaaatttaaggtgacacgtaagggaaatgatacgtcgtggacgttgtacctttatgcgcttccttatcttgttttatggggattagccgtttatgggttggtgacttttaactatggaaaatttggttcagagcttttttatggaagtattatcagtttttggttgatttatcatatcatcaatttgacctttgcgattttctgtgcgattggtcgtccgatttatcgctcaagtgagcgttttactgttgatgaagctatggttattgaggttgatgatgattcttaccaagtgagagtctgtgatatttcagaaacggggatttcattctatacggatttaccattgtatttgccgaaagaaaaagaactgacgcttaatttgcaatcacgtgcttaccatgcgagggtaaaaggtcatgttgttcgtgtttttgcgattgataatggttggcgctacggcgttcaattttcagaaattcctgaagctgataagcgcgaattttatcagtacatttatgaccgcattaatcacaatcttccgaaggaaaaagacccttggatgacaacatgggatgatttatttgagaactttagtcaacgtttccaaaataatgaacgtcctgtttcagcctatgaccaagtagcttttccgaaagttcgtgttaatgaagaggttcaggttgctggaaaaaaatgccagcttagaaagacagattattattacatgacattttctggaaaattgacaaatcctaaaaaaggaccgaatgtcgcatttacctacaaagatttgccaattcagttgacttttgtgtcctatgatattgatagagacgaatcgctttatcgagttaccaatttagcggatttggatagcttacctgcttttaaagccttagcaaatgaatggagagggagagtatgattagtattgctagattactgttgttctttgtgattaccatggggtacaatgcctttttccgtaatactgtgaagatgaatcgcagtctgacatgggtgtttacattttcagtcattacattggtattgtaccttggtagtttgttaggctttatgttgcagaccgtgtatgccatttctgttttgggctgtcttttgagtctttattatctttgggcggtatggaaaaagaaatatcgctttaggagacttgattatattgcgcttggaatgatggcttatttgcttttgtttggaataacgctctggcattcaccgcttttacattatgataattttacgcattgggcaacgattgtaaaatttttccatatcaataatgctttgccaacacagcaggatacgattattagttattatacctatcctgttggaagttcacttttcatttattttttcacgactatcgtaggcttttcagaaggtagtatgttggtcgggcaattcttcttgattgcttccagtctttatgccatgtttgcggcacttcgtgatgatcgacgtgtcttaatggttagcatgatttttgcttcgtttgctgtttttaatacgttcaacgttgctattcgattaaataatttgctggttgattttctgcttccggccttggccttggcagccatagcaggttgttttgtctatcgtaatcgtttctggtttttgtcactaaatacggcggtaattcttggattattaagtatcgtcaaagtaagtggacttttctttgtcgctctcgttttagtagtttatgtggtttgtattgtgcgtttacttgttcgtaaaagagcacgtttaaaagcactagtgctgctcataatgaccttgctagtcagctgtcttccttttgttatttggcaaaagcatgtgacggataatttcccaaatgcctcaagtgccaagcatgcggtgtccatgtcagaacttggtcaggtattgactggaaatctgtcaggcgacccacaaaaaattatcactctttttgtcaaatcggtgtttacgtttgacagtttggcaagcaatggaattttgataatcaatctgattatgctgattgcctttattgtgattggcattcgtttgaaatataagaaatttgtcttgttgacttggggatttgttgatatttcgattgtgacttactatattggcattttactcatgtatctgacagcaatgccgactgatgaagcgttagaattagcaggatttgagcgctatgcttcgagcatcgttatctttgcttttggttgtttgaccatggctttagcatgggtaatggacaagtgtctgtatgaaaaaatcattagtaaacgtaatgctaggtcttacaagagcttatttaataaacacttgtaccaatacgcgagccttgttttgacagtttatgccattggaatgttcttgtcagaaaataatagcattgtttacaataacaatcaggaaacaaacgaggtcgtaaaagaaattcatcagtttactggaagtcagagtaattcgtcaacggatagaattttggttgtaacagcagataaggagaatgtagataattattttgtccaatatgctagtcgttattatctgtgggatgtcaatgttgatgccagagaaaattttgtgacggctgaccaagaatttttagatttaatggcatcatacagcgacagcgcaacaagttattacctcggcaatgaaaatatcgatactagagatggttccaatttaacagacgatgactttattgcactcttaaaaacgtatgacgaagtcttgattttagatgaccattatacgtttaatgccttgacgaaaaaactatttggtcggacatattccccaggattgtataaagtatcagatattcttgctggaaaagggtaagttttctagctttatcaagcataagtcttgatatttcaaataaaatattctattataacaaaaaatatgtagaaggaggcggagtttgtgacttcgcctcttgtagtgctcaaaagactttcttgaacattggagaggaagctaagataagtccgtttgaattatctgctctactcatcacacaaagcgaggtccttaaaagatacaatccacgttccacacactcaacactagcatagaaaaatctcatatctacaaaagcaatatcagattttggttctcgtgaacaatcaaaatagccctttatctatctcttttatagttgttttcccaatattccctttcaccttttcctatgccttctggtagttgcttcaaacattgtccatactttgatatttaacaatttcagttatttcagccaaagaaagtcgatgggatgctctgctaaagtccgtatcgaagtaatcaacctcttctatttcaactaaaatctcataattttgaccaagataatatttaatttcagacggtactaacttctctgattcttactgaagtaaaataattgaattaaaaaccatgaaaataagattttcatggtttttctattactcaaagaggatctcctatgacaaaaatagaaacatttagatggcgtatgtggcatgtttatctccttatttttataaccattctacttacaggtacattcgttcgctatggttatagacttcaagccgattattctttagacgatagactttacgactatactaacaaaaaagttactgtaacatcctttcaaaacgtcaaaattggaaactttaacgttttaggtgttaagtttggaaatgaaaaagcactggagagaagtcaattagccgtcggtcgcacctatctagccttccaagaatctaggtataaagcatctaaacacaagaaggactctaaaaattatgatattatccactattatcagcttggtaaagatactggaaaaggatacactattaatgtactagaccttgctaagaaactaggatatgatgatcccggttccatggataataccatgttctccgatggtaggaatgagtttgtgaaattttcatcctatgacaacgaaaaagtattctatgtcaatttacgcacccataaggcaacaaaaccaaaccagcaaaagtcagtcaatactacgaatttgctaaaccttaccgctatctcctttcaaaggataatgtttctataggtcataaagaggatcccctcattatcaactccatgccccttatctggaccaaagaaagaaattttgctgattacaaagatcaagacaataacgaatacagtgaccaatcgctcaaaaaaagattcagcctaattatcgtaacaactgattcacttaatttggatgatgccattaaactccaaaaggagttaacaccaaataaggagggtatctattggtattttacaagtactgatacaacgactggacacctcgaggaagttaaaagtcaaaaagattacaacctactagttaaggagagtcataactaatatggtaaaaataacttcaaataccttaaaattactatgcccttgattttattattgaccatgattgctatctttttctattacaatgctcaagaaaatattagaggtttttataaaactcgtggatttcaaggaaaggtgcagataactggtatcggatgggcagataaaattacttatcgtatgaataaagaagatgaggttaaacattacctgattttccatattgattatcaagagaccattaataacaaaaaagaacatgtaaatactcaacttcctctccatattcaagatttactctatctttacattgccagcccaacagaaagcgactcagattttaatcgccaaaatagtgaatataagattttacctgatgaaagagaatatggggacgactttattaaaaagtctattaaaatcaaccctagaaatcaaaaatttatcaatgatatctctaaagctttaagtaccgagaaagatttaaaaaatattattgttcagatagaacctgtaccatacacgacgctctatacttatgagaggggacattctaaagcgctaggtggctattatgatttttcacttaaagatgctctacgaaacaaacaacttactgtccaattgagttttccttctggttccacgactaaagaaattgacttacattctcaattagaacaggtacttaaaaactctgaactaccagatggatggtatatcttaaatcaaaataacgactttccaaaagaggtacatattgatgacaatcaaattagaattaactgaagaaagaactcagagagaattatctgaggaagaatgggctttccctatttggagatgggcggctttctcattatttgacaccctaatcctagttagtcccttgacaagagaattgatttatcctgggggaagtgattctcggttttacctaggtaaatcattgggtaacttgatgctagatgatacacaacgcttcatctttattattatcattctaactcttttgctacctgcttttgccttaatcatagaaagcctattattttcaaaaggatatcctctactttcaataatatgtagctgtctaatttttgttagtgcaacagtcctatttgtctacagtctcagtattgtcccagatttttggagctttactatttatagttatatgctttaccttctcttcaacataggtaactccctcagaaaaatcaatagaatcatcaatcttaggcagaataacaccaaagcataacagcctctatctacataatactccccttttagtataggaatgacacaaatgaaacaaaaaaatcttgtctactctgaagttgaccacctagctaaaagcttccatattaattttgaaaatcattttaggaatactctagacccctgtctcagaaataaatttcactccttttgtagcaaataaacaatttaattaatagtaaaaaaatcaacatattaccgttgatcttttatttttactctaaatctttcagaatatctgtaaatctgtgtgtaaacatagctgtcatcccccatatattttctgtcaagtttctgtaaaaaggaatatgacgttcactatatccaaaattgtatttttctctgttttttaccaagaaaaatgggaaatctttcgcatcactcaaggtagaaatcactttataataaatcggattctctgtcaacaacgtgtcaacatagattgtaaacaaccgtttcacctcttcatttggatgaatatcctcccaattttctatatttatctttccaacaaagcaatggatggttctcccctgatgaatcagataatcaatctctccccaaatgtcaatttgatcaggaaataagtttaattcctcacaagtttctcgtatagcagcttcttgaaaagtctcaccttcttcgacacggccaccaggaaaagaaacctcacctggttgagaaatatgctcacttcgtacttggtaaaggatttgatacttatcagtttttacatcatatatcaagggtaaaagcactgcatagcgtcctttctcccctagtggctttggctcgtaatgagctagtttatctttaatagtcataagaactccttgacttcatattatcataaaaaataagttatccctattatataaattttttatatataaaatattgacatatctttctaaaagagatacactcaatgtgtaaaataattatatataatttttatacatatcctaaaagcaaaggagcacattatgtattttccaacatcgtcaatcctgatagagttcctaatactagctattatagatagagaagactcttatggctatgaaattagtcaaaccattaagcttgtggctaatatcaaggagtcaacactttatcctattctaaaaaagcttgaaaaagcaggctatatgaccacttatagccaagcatatcaagggcgtaaacgtaaatattacagtattacccaagagggaaaaaatcatcttcaatttcttaatgaagaatggttaacctataaagaaaccctcgatggtattgtagaagggagattaagacatgacaaggactgaatatatagccaaattaacaaaatatctacgaaaattaccacaaaaggactatgaagaggctctcgaatatttcatggaatattttgaagaggctggacctgaaaatgaagctcaggttattgcagaattgggtacacctaaggaagcagcacatgaagtcattagtcgtcttctagacgaaaagattattgaggaaaagagtagcttacgtaataaaacaactatcctctggattgcgattctagctgttttagccagtccagtcgccttaccaattctactattcttcctagctatgctattaacacttcttgtggttatttttgcagttatagtgactgccttagctcttacttttgccttactcattagtggtatttacactttctttacaagcttctctctcttaaatgtttcactagcttcaacactgtttggagtgggtctaggtctattgatgtttggaggagcactcttactgcttttgatttcatttgaaatctgtaaacttattgtaaagctaattaccctattgattaaatggctcatcaagaaaggaagaaaatcatgaaaacttggaaaaagattgtcctcggagtgtctcttatctctctatttttaggaggaggattagtagcttggggttatagccaaggtggcttaacagatttacaaaataaaactataagtgagcaagattatgtcaagaaagaagttaaggacttcaataaaattgatattaaaagtagtagctacaatgtgcttataaaaaatggtgaagttgacaaagcaacgctttcttactaccaaaaaacaaaaaatccaattgacacatctgtaaaggatggtcaattgactatcaatgataacaactctgaattagattcgacttctaacaaacatattaactttttcggattaaaagatttagtaaggctttctactctcaacaaggaagtcagaaataaaaccattgtcattacactccctaaaaaacaaacgattgattttttaaaggttgatttagcaactggaaatctagatttaagtaatagcaccatcaaacaagcagacatcaatctaaatgtaggggacctaacttttactaaaatgattgtcagcaacctaaaagctaatcttgatgttggtagtgttgatagtgatcatacactttttactaactcagatttatctattgcaatgggagattactctggagataacctgattttcaatggtcacaataaacttgatgttacatccggtgatattgaaatagttcttaaagattacacgctcaatgttcaagccgatagtcattcaggagaggtggacatcacaaataaccttaagatttcaaaggataacacactaactattacctcagacctcggtgatataactgttgaataacataaaaagccagctcacattagagccggcctttagtttattcattttcagactttggtctataaataataatacctacaactacaaaaataagtaagaaaatgaataacatacgtacttgatctgagatctgtcctgtcattgaaatagtttgacgaagacctgatacggagtaggacattggtaagaatggttggacgaccttaaagaacttaggactaagttcaattggataagttcctgcactagaacctagctgcaaaaggagcataatcatagaagcaaatgcaccatatctatcatcccaacccacaagagctgtaacgagcgccattaaagtccatgctgcaaggagaatcataccaaatgtagctaatggatgatttggttcaactcccacaaatcgaatggcaatataaagggcaattgcagccatagtcgtaatgataccattgataaagaacttattcttagcccaatcaaaacggctcgtaaagtttcttcctgtcaagctcttagcaaagataacattagttgaaagagcgacaaccataagagaaacagaaatcatatatggagccatccccacaccattagtgtcaaccttatccttatcagttttcttctctttaagcggagcactaaccatttttgcattgtctgagtttacagaaacaagagatagttgctgattagccttatttaatgaatcagacaatgtggaaaggttagttgacaaacttgtcaacccatttgttaaggtatttcctccagttgctaattgttgagctcctgtattgagagcatttgtaccactctgaagagtagcaaaaccagtcattaaactactactgttagcatctagagtttgagcaccactggcaatcgttgacacagcaccagtataagttgacaaaccatttgaaagtgcgcttgcacctgttgctagagtactttgagcggttgacacacctgatgccacttgagttgctcctggtgataattgattaacaagtactgaattgacattagcaatattagcttgcattgatgataccgttgatgaagctacagggagaagagcattcgccgaacttgcaatgcctgaaatagacgtttgtagagaagccaaactacttgaatcgccgctactagttgttgtcgtacctgtcaagctagataaagcagttgacatacttgacacatcagatgcaatagttgaagcgtaactactagctgtagatcctgcattactaattgccgatgtaatctctgcttgttgatctgcagtcaagctttgataagcagctgttccttgtaccgcagccaaatcatttgctttatcagttgcactagctgtagctatagagctagctgcagaagaaatatttgaaagataagtcgctattgaacttgtatctactgatgttgttgatgttccacttggtaatgatgtgttacttaccgctgtattaagattttgaattgctgtatttaaatcagttaaattagttgatagggttgacaactgtgcttgctgttcttcggataaacttgttgctgtggccatttgactgagcgctgttgacaacgaatctgcacctgtaactaaggtattcatggcctctgctcctgatacaaattgacctgcagcagaattaacagcctcagagttcgcatttaactgtgacaaagcgcctgacaaagttgacacacctgaagtataggcagacgcgcctgaactcaaggtatcaacacctgtagccaatgtttgtgtagatccagcaagagttcctaagccatttgataaggtctgactcccagactgaagtgcgcctgcacctgcatataattgactagccccattcgctgcagttcccataccaccctgaagttgagacatactcctaaagacagctccaacataagttgatgtaatatttttagaaacagtatccttcaacttagacatggcagaatcgctcatttttgaagaaacgaagctatgtcctgctgttgtttgataagaaatttccagtttcttgggatcatttgtcaaaagacttgctgcattacttgagaggttttctggaaaagtgattaccatatagtaatcaccatcctcaatccctttttgggcttcattttcagtcacaaagtgatagtctagatttttgtttttagacatattgtctaccatatcatgaccaatattcagagtcttattctggaaactagcactcttatctttgttcactactgccactggtaagtgtttgacattaccataaggattccacatagaagacaaaaagattagattatataaagcaggtatcaatgagacaccaataatagttatccagagctttggacttttaagaagagcctttaattctgctaacatatttctcctttttagacattgtgtttatttttatgatataatcaattataaactcatttacctgaaaatcaatgttaaacaatcgctttttggacacatagtctaaaagtgtataaaaggagatttgtatgtcaaaagatcaaagacgcgcgcaaacaaaaaaagctcttttagatgctttagtaatatgtcttgaagaccaagatttcaatgatattactaccattcgtctggttcaaacagcagggattagccgttcgagtttttatacccactacaaagataagtatgaaatgattgatagttatcagaaagagcttttccacaagctagagtatatcttcgataaatatgaaggaaagaaagagggagcctttctcgaaatctttgaatttctcactcgtgaaaagctcctatcagctctattgtctaccaatggatcaaaagaaattcaagattttctgatacataaacttcagcgtatgatagctgaggacttcattgatcccactgctgaagaaagagctctcaaaggattcgagaaagactatgccagtatttattttgcgcatgctatttttggcgctggtcaagcctggataaataaaggaaaaaaagaatcacctcaagaaatgacagactttcttctacgatttattccacaataaaataacttcaaaagcataaaaaagctgcaaaccatttcaatagttaaagcagcttttttcttttacaataaaatccttaaaataaggaaatgataagtgaaagcaaggtcaaaattacgggtccgccttgcgttaaaataattttcttattggcagttatagcaccataaatagcagcaaagaaaacattgagtacaaaaacagttacaagtagctgactatttgtaaaaattccatacaagaggaatacagcaatcaaaccattgtaaatcccttgatttttaaataagtttgtaacagaatcacgttgaagttcttctttgctcatattgaaaacacgactagtcgtgtctgaatgtgtcgcaaaagtttccaaatacatgatatagagatgctccaaagcaacaatcccagctaaaattagtgtaataatagacatagtagcctccttcttaagtaactttgacagtatatcaaaagtaaacctttaaaacaacatgcatgcttcatacaattcgaaatatggtaaaataaagaatgaaagagaggttcttatgacaaagacagaagtaatccaacgtctccaaaaagatctgggaattcccagatttcaggcttatatagaggataaagattactccgaagaggagtacgaccaactaaaaaaagattttgaagcctatttcactaactacgtttcaaatgtttcagcagattttgaaggcggattggataataaataatttatacctcaaaatcatctatcatcatattacgaatccccagtcacttgtactagactagggactttttttattagaaaacaaaaaagccgtctcattctatgagatggccatggaatcaatctagcaaatatctaagcaaacccagaaatcaacgatttaagataaacaaaaagcccataacaacgggctttttgcaaaatgaatcttaaaattaaagcattttgttgtagaattcaacgacaagtgcttcgttgatttctgggttgatttcatcacgttctggaagacgtgtcaatgaaccttcaagtttttcagcatcgaatgatacaaatgctggacgtccgatagtagcttctactgcttcaaggatagcaggaactttagctgatttttcacgaactgagattacttgaccaacttcaacgcggtatgatgggatatcaacacgtttaccgtcaacaaggatgtgaccgtggtttacgaattgacgtgcttgacgacgagtagttgcaagaccgagacggtaaacaacgttgtcaagacgacgttccaaaagaaccataaagttgaaaccaagtgttccacctttaactttagtagcttgtacgaacaagttacggaattgtttttcacccaaaccgtatgagaaacgaagtttttgtttctcagccaattgcaaaccgtactctgaaagttttgaacggttgtttggaccgtgttgacctggtacgtagttacgacgtgccaattctttacctgtgcctgtaagtgagaaaccaaggcgacgtgattgtttccatgatggacctgtataacgtgacattaataatgtcctcctataaaaaaatatttttaggaaataacgttttagataaacctgattcgttcagaaagacttcgcccaaacagcaaaggttacttttctagccgacttcctgttgacgagcttcattttatcctgctattatttcacatactttagtattttaccacgaaaaaaagcccaagtaaaggctttttcttatttattttcgatttcagcttgttcctcaggactcaaataacgaatgagagtcttctcagtcaaaatatctgaataagtgtaagattcaacataactattattaatagctcctgcttgagaactgaagtcttgatattcaacaataaacaatgatggataaacttctgtcaatcgaccaattttattcttttcacgtttacgtccattctctagggtcaattctactagctgaccttcatgtgacttaatagcttccttgatgtttttcatcttagcaacatctgcaaatgcatcactcatatgtatgtatatctccttaaatctgaaaattatgattcctcaaactgagcaatcgatgaaaatttattgtattctttttggaatagtaacttgactgttccacgcgcaccagcacggtttttttctaggataacttcgatggtattatcttcaatcgcattctctggttcttcaccttcttttcggtagtaatcatcacgatataagaaggctacaatatcggcatcctgctcgatagatcctgactcacgaatatcagacaagactggacgtttatcctgacgttgttcaaccccacgagataactgactcaaggcaattacaggaactttaagctccttggccagaatttttaactgtcttgaaatatctgaaacctcttgttggcgattttctggtcgcgtccctgtaatcaactgcaaatagtcgatcacaataagaccgagaccaccctctacttcttgtgacaatttacgggaccgtgcacgaatctcagtaatctttatacccggggtatcatctatataaataggtgcctcagccaatgccccttgagcaatcatcacattattccaatcttgctctgtcaattgacctgtacgtaaagcatgggaatcaatcatcccttcagctgccaacatacgatcaaccaagctttctgcccccatctctagtgaaaagactgcaacagctttattttgcttggtgccaacattctgagcaatgttcaacacaaaggccgttttaccaactgcgggacgagctgctaaaataattaattgatcagggtgtaaacctgttgtaatcttgtcaaggtcacggaaacctgttggtaacccagtaacatctgatgtttgctgtgaacgcatctccaaagtattaaaattgacatcaagaacttcagatattttgcggaaaccactacgattactatgctctgaaacatcaaccaaggctttctcagcattcgcaataatttcatcagattccgttgcgccctcatatgcttggttgacagtctctgtcaacctatttataatacgtcgaagcatggctttctcagccacaatcttagcatagtactcagcatttgcggatgttgggacactattgaccaaatctacaagataagaaataccccctatattttggaggtcatcttggtcatctaaaatggtacgtactgtcgtggcatcaatggcatcatttcgatccgacagcgttaccattgctttaaaaatgacacgatgggaatacttgtaaaagtcgtctgcttcgataaattctcgaactgtaatcaacttttccgggttaatgagaatagcccctagaacagactgttccgctactaaatcatgaggttgcactcgtaattcttgagcttctgccacaattattccctcctttacaagatttacttatagtgtcaacgaattactcagcactatttttgatgttaagtttaatttgtgcactcacttctttatgaagctttacaggaacctcaattagaccaatcgcacgaataggatgttcaagttcaatatggcgtttatcaactttaataccaaattgtttttgaagtccttctgcaatctttttggctgtaattgaaccaaaagtacgtccgtctggtccgaccttctcagtaaattgaagacgattttcttctttttcaagttgctctttaacttgcttcgcttcagccaacaactctgctgcatgtttttcttcagatttttgcttacctttcaactcaccgatagcttggtttgtcgcttccttggcaagattctttttaatcaagaagttttgagcgtaacctgatggtacttctttaatttcgccttttttacctttacctttaacgtcttgtaagaaaataactttcattttagtcctccttgggagccaattctcccataatagtttcaatcaatttattttttgcttgagcaacactacagtctcgcaattggcaggccgctaagttgaaatggcctccaccacccattttctccataatacgttgtacattaatcgttttatggcttcgagcagatatattcacagtagaatcactggtcctagcgacaacaaaagttgcttcgatacctgccatggcaagcatcgtatctgctgccttagaaatcacaacattattataacatttaggattatcacctgaggcaacaatgatatcatctgtaatacgttcacctgctagaattagctcattgatacgtcgatactcttcaaaatcagtggcagaaatcgtttggatttctccactatcacttcctaaactacgcagataagaggcgacatcaaaggttcgactagtcacacgagttgagaaatttttagtatccaacatgatacctgccataaggatagaggcttggattttacttaaacgttctggggcaccttggaattgcaataactccgtaaccaattcacaggctgagctcgccccactttcaataaaggtcaaaacagcattttcaggaaaatcatcatctcgacggtgatggtctacaacaataacttcattaaatcgatcataaaaatccttagataaggttaaattgattttagaatggtcaaccataattaacaacgaatgttggttgactaactcttcggcctctgaaagtgtaataagaggtgactgaccatcttcttttagccgttcgactgcacgctcaatatctgcattcatagccgtatcatcgtaaacagcatagctttttcgaacaatttgactggcaaaatgagccataccgaccgttgcccctagagcatccatatcgagattcttatgtccgacaacaaacactttttcgactgttttcaacttatcagagattgcagtcatcatagcccttgttcttgtacgagaacgttttactgttgaaacagaacctcctccaaaataaagaagttccttgtgatcatcgttttccttgacaacagcttgatctccaccgcgaactagtgcgatattcagattctgcaaggcaacctgaccgatttgatcatgcttaagcgtaccaaatgaaattcccatgctcaaagtcagtggtaaaccacgctcctgagcctgctgacggaaatcatccaagacagaaaacttttgatccatgaattctgtcaaaacactgtagttggtgaagaagtaaaaacgatcaccttcaatacgtcgataatgaatatgcttggccttagcaaactcagaaataaaccctgccacgaatgtgttgatttttgaaacatcggcatcgggtaaacttcccgtcacatcgtcgtagttatcaactgaaataatcccgataacaggacgagtcatatttggatcagcattttcatcttgatcataaacattgtcaataaaatatgtcaacttattgtcaaaatccacaaaagcggcatatttattgtcaccaacggttatcacattcgaaggtgaaccctttcgtttctgggaaataaaatccgcaatcaactgcttattgaaatttccattttcatccgaaagtactagcttcgcataggggttgaaccattcaatatgatcgttctcatcaaaagtaataaccccaacaggcatctttccgagaagggtcttcaaagaatcttcaacatcctgattcagttcatctaattgctctatttctaaggactcatatgttgtcttttggtaatgcaataaggcaacaactactaccataataataaaaagcgcaaaaatgagtgcagactccgattttagtacgcgaacaaaaatagtagcaattccaaaaagaattagcccaatcattacaagatgaatcgttgcaaagtgaaatcttttcatataaaacctcttaatctaacaattataacataaaaaagccttaattaaaaggcttttaaacgtgttagcaccgttagtctactttcctgcgggccttattattaccttcaagataaaccatcagaattgagatatctgctgggttgacccctgaaatacgactcgcttgaccaatggtctcaggattgattttcttaaatttttgacgagcttcggtagcgatggaatcaatagcatcccaatcaatattttttggaatcctcttttcttccatacgcttcatcttagctacttgatccaaagctttattaatataaccttcatacttgatttcggtctcaagcaactctactatcttcgcgtccaaatcttctacagctggacctacaaactgagtagctgtggcgtaatcaatctctggtctacgcataaactctttagctgtcatggcatctgtcaatggcttaaagcctagagcttgaattttttcattcgtttctttaataggttttaatttttcttttgacaaacgtgtcaactcgctgtcaaactgatttttcttaatttcaaagatacgccaacgttcatcgtcaaccaaaccaacttctcgaccaataggtgtcaagcgcatgtcagcattatcatgacgtaatatgagacgatactctgcgcgtgatgtcaataaacgatatggctccaaagttcctttcgtgacaagatcgtcaatcattacaccaatataggcatcactacgtttgagaataagttcaggtttaccttgaactttaagagccgcattgataccagcaactagaccttgacctgctgcctcctcgtatccagaagttccgttggtctgtcctgctgtaaagagacctgaaatcaacttcgtttcaagtgttgcacgtagttgatgagggagcacgatatcatattcaatcgcataaccagttcgcatcatctctgccttttcgagacctttaattgagtgaatcaactctttttgaacatcttctggcagactagttgacaggccttgcacatagacttcctcagtctctcttccttcaggttcaaggaaaagttgatggcgattcttatcggcaaatcggacaattttatcttcgattgatggacaataacgaggtcccacccccttgacaatacctgaaaacattggggcacggtgtaaattgttattgataatatcgtggctctcttgattcgtataagttagccaacaaggaatttgatcctgaagataatcttcatccttcgacaagaatgaaaaatgattcggcttttcgtcacctggttgaatttcagtttcttcataattaattgatgatgccttgacacgaggaggggtacctgttttaaatcttcctatttcaaggccaagatccctcaagttatctgccaatgtaacagatgcaagactattattaggacctgaagaatatttgagctcacctaggataatttcaccacgcaaagctgttcctgttgtgacaacaaccgctttagctccatatttttgatttgtggctgttctgacaccaactaccttaccatcttcaacaagaatttcatcaaccatggactgacggagagtcaggttttcctgacgctcaactgtatgcttcattgtcatagcatacaaggctttatcggcttgtgcacgtaaagctctgacagcaggtcccttaccggtattcaacattttcatctgaatataagttttatcaatatttttacccatctctccaccaagggcatcaatctcacggacaacaattcccttggccgatcccccaatggaaggattacatggcataaaagccagcatctctaggttaatagtcgctaataaaaccttacatcccatgcgggctgcagctaagctagcttccacaccagcgtgaccagcaccaacaacaattacatcaaaattttcatcaaactcgtaagacattttttagatttatgcagtgatttacaatcaactgcccatcctttctttgtttttttcctacaaaaatagccaaaactccagaaaactgtacgcaaaaacgcacaattctcatgagctttgaccatcatgactattgttaaagttattttatcaaatcaaatcgttttgtcaatgaaaatcactatttaatcaaggtctgcacactgacgataatcatctgtatacctattgagaatagtaaaagtcccatcattttcgtgataattttcatcaaattttctcccaagaagcctgcaatttgttttgcacttcttaacaggagataagtgatgacacatagtagagcaaaagcaactacggttatcagttgattctgcaaacctccattagccagacttaaagcagttgtaattgtacctggtcccgcaaaaagtggcattgcaagaggagaaatagcaatagacattggatctgaatttactgcttgctgctccattcctttatagctgggtgaatgattaccattaatcatatgataaccgataacggccactaatattccaccagcaattctgaaagaaacaattgtaattccaaatactttaaaaatgaaatctcctgaaaagataaaaacagttataataacaaaggcaatcaaaagactcctaaaagcaatttttcgtgaaattttttgactatcatctgctactaaagccatgtaagcaggaagatttgaaattgggttcattatagcgaaaaatgccataaatgcataaaaaaattgagaactcatcgtttttacttaactccagttagatatactgacaaacttttccgtctttatacgcttggtcaataataccgccgcccaaacattcctgaccatcatagaaaacaacggcttgacctggtgtaatagcacgctgaggttcagcaaaaatcacctctgctttatcacctttaacctttacagtaactttactatcaggttgacgataacggaattttgctgtacattccatttcaaattcttctggcatatctcgagtaaagtgaatcattgaagcgtcaagagaagttgacatcaaggactcatggtggaaaccttgacccacgtaaagaatatttttagaaagatcttttcctactacaaaccaaggagcattatctccacctttttggccaccaatacccataccaccacgttgaccaatggtataatacatgagtccattgtgttcacccatatcacgaccatcgacagtcatcatacgacctttttgagctggtaagtattgactaagaaactctttaaagtttttctcaccaataaaacatattcctgttgaatcttttttattggctgttgcaagacctgcacgttcagcaatctcacgaacttctggtttttgtagatgtcctaaaggaaacatcgttttctgcaactgctcttgcgaaagttgactaaggaagtaggtttgatctttattgttatctgcaccacgcaacatatggaaaatgccatcttcatcgcgaacaacttgagcgtaatgtcctgtagccacataatccgctcccaatgtcatcgcataatctaagaaagccttaaacttgatttccttattacacataacgtctggattaggggtacggcctgcacggtactctgctaagaaatactcaaatacacgatcccagtactctttttcaaagttgacagagtaataggggataccaatctgatcagctactgctgctacatctttataatcttcggttgctgtacacacaccaaattcatctgtgtcatcccagtttttcatgaaaacaccgattacatcataaccttgctcttttaaaagtaaggctgttactgatgaatcaacgccaccactcataccgacaacaacacgtgtttttgaattatcagtcatagataactcctcccatcaaataaaaattaacatagacttgaagggtctagttattcaaatatcgatttgaaggtcgattttgaagcgtaaaagcacgcaagcttaattatatcatgattaaagaataatgcaaaaaggttaccactaggcaacctttttgatacttattttcgtgtaaagccactgtaaacctattactcccaagactattattggaatcaataacgctacaaatagccatcctggctccttataacttaacacaagtttattctgtccttcttgtgatgaaacggtcggtgtaccaatcgttgacaagctatagtcatccttgtctagttctttaccatttagtgtcaagatagaatctttatagacaactatcggtagattctgtttctccccttcagcagcctgccaagttaatacaagataaccatcttcgagtagcttttctgccttctgattcgtaacgatattttcgtaataaagatcataagtgttctgcttacctattgtcccataaataggtacgtaatctggtgtgggtttgacaactaaatttaaaaactgtgacaagtcactgtcattcatggtaagacttatcgtctgataatctccttcaacgtaagtatgtttaacaatggaaataagttcaccatcttgtgccgcagtttttacacgatcggtagtatccatcatattctgaatgagaccaacacccgcaaaggcaaagagtaaaacagcaatactttttcgccagtttacaaatcgcgtgaccgttaaccccgtaattgctaaaagtaaaatggtagcaggaacaaagaacctaaatggaaattggatcagttcagcaaatgtatttccattttctactagatactgccacggaaaaagacctgtcgacaagaagaaaaagacaaaataaataaaatgcagtatttttttccatctagcaaatttcttccaattcaaaacagcgtaaagaaactgtaaaatgagtaacaccattaatgaaattggggtatatagccagtatcttgctgtcccatctatcccattcttaccaatttctctatttataaatggatctaggagatgattagtccctctcaaatataggagtactaaccagacattgacagtcagtaagaggaacagaatgactgctataaggacttgtacgaaggtttcctttttcttagctataggagactttacaaaagtgtaaagataaaaaggaagatacatcatcactaatatcaaagcactgagtacgtgaacctgaaaaatcaatgccatagataaggcaagtctaattggttctactttttgataaaagacatagtgaattgctggaataaaacaaaaaggtagtaaagctgctccccaactagagaaaccctgtcgcatcgtccagtattggatagagaatgttgtcgcatagagtaaacctagtgacaaggaaattgttgtcttaactttacactgcttgagcaaggcatacattgaggactcggctagtatatgtagtaatacccttgacacaatctgataacgaaaccaagtgccacttattaaaataagccctccttgtaaataggcaaaaaaaggaccgtaaagagcattgacaatgcggcctgactgttggaatccatataaagataaaaagtaagaaaggttaccattttttagttgcatagcagcttcatagaacctgttatagtgaaagatggaatctgaacctaaaatgacttttcttgtaaatagttgtggtgtaaccaataacacagcaaaagctataataataagagaaacccacaacttttctcttaatttaaaaatttgtttcattgctatacctttcattcctattataacaaaaaggccatgccctacctagtaataacaaaagctctataaaacagatttcctacatccaaattaaaaagctgagagtatgctcccaacttctattaatatttaatattagtaattccaagctgacaaaccttgtgcattataggcattcaaggctgattgaatttgatcctcaactgttgcagtagagccccatccaggcattgtttgaaaaagacctgatgcacctgaaccatttgctgcagtatgatcaccatttgactcacgcgcaataatagactcccaagttgactgaggaacaccagtagctgctgccatctgtgccgccgcataagaaccaacttctcctgcagtgttcccatttgagagaacaactgacccgctaccagttgcagcaaccgaaggagctgttccagtattttgagtcgacgtagtatcagtatttgttgaagcagcgcttgtagtagcagtatctgactgagacttttcagctgcttctaccgattctcctgttgtttctgactgaggcttactttcttcaaccttttctttattagctttattctctttacttgagctaatttctgttgatttaactaaatctgctgtcgattctgacgttgttgatgctgttgaaggtgctggggtaacagaatctgaaaatgcattaaccaaccctttattaattagtgtagacagtgatactgccaaaatgacaataaaacttgttacaattgccactggtaccgccaatgatttcttcgctgctaatttgatacggcgtcccttataactttttttaaacataaatccctcctagttaattctagttacattcatcataacttagtaatattactgccgattatttgtattatgtctaatgttacaatgatttatcattttaataaaaaaatgccaaaaatctggcatttttcccttatttgtatgaggtttgactagttttcctcataagtcagtaataatgatttagtaccaaccattagcattccagaaagcaagagctgctgtccatgaaccataacggcttgcgacataattatctgctaccttctcttgattttcaggagataagtctccgttcaaatatgatgatgctaattggtaacgtccataatattgcccattttgagctgtatagctaccgcttgactcacgttgagcgatttcttctttggcagctgcctctgaagaagaaagatttgtattggttgcttgagtatcttcactttgtgtagactctgttgattgtgttgattcaacagctgcttctgttgtagctgaaggttctgtagtctcttcagttgtttcattaattgttaagttttgaccaatagaaatcttattggcgtcttgaataccgttttttgaaacgatttcatctacggtcgtaccattcttcttagcaatagctgaaagagtatcgcctttttgaaccgtgtaagtttctgcattagctaaagctgttgctccaagtgtcgctactgtaacaagtccaaaaagacctaattttttagtgttagatgtattctttttttgcatgatgatgctcctttatctatttatagtccaatccatattagtcaaagattttaagttattttattgtttatgactaatgggtaaatcaactggcttattctatatagggatttttcaatccagattaagctgaagaactataaccatgtatctatgataccttggaaatataacatccccttgttagggatattaaaaatattacaagtaggttgggattagacgaaaaaagaacgcctacgtgggcgtccatctaaaacttctaggtcttaagacctagtttttatttatctcaacgaattaactcttaagataaaaaagcattaatcctaaagataaaatagcaataattgataaggtatctcgaccattccatgaaagtcgacgatattttattcgtccttcaccaccttgatagcctcgtgcttccatagcaatcgccagagcatctgctcgtttaaagcttgatgcaaacaaaggaattaaaataggtattattgaccgtactttctgaataatatttccttcaccaaagtcaacaccacgcgccttttgagcattcataatacgagtcgtatcatccatcaaagttggtacaaaacgtagactcaaagatagcattaaaccaatttcatgtgctggcactttgaaaacagtaagtggttttaaaagtgattcaactgcatcagataaacttaaaggtgttgtcgttagagtaagtagggtagaaaaactaataatgaggataaatctaagaaatatcatccaaccttgatttaaaccgacttccgtaatctttaaaaagccgatagaccaaagcacactcccttttgtattgaagaaaacttgaaatagggtagaaaataaaataatccaaatcattggtttaattccacctaaaaagaaaccaagttttattttagacaagaaaaccaagaaaagtgtaaataaagttattacagcataagttaaaggattattagcccaaaagataataacaatataaatcaacatggctaataatttacttctaggatctaatcggtgtataaaagagtccccaacaatataacgtccaataattaacttatccatgcgacaacacctctacgaattcctcgattgtaatagggagagtttcaaatcgataacctttttcttgtagctgtagtgcaaactctgtaattttaggaacacctaattgcttttctttaagaaaagtaaccttttgaaaaacatctttaggagctcccgtcaacactagttgccctttttccataacattcacagctgttgcataatcggcaacatcatccatcaagtgagtaactaaaacaatcgtcattccagaaagatgtaactccttaaagagagacatcaattccttccggccctgtggatctagacctgcagtcggttcatccagcaccagaatatctggttgcatagctagaatccctgcaatggcaacacgtcgcatttgccctcctgataaatcaaaaggattctgtccatgaaattcttccgggagtccaactaattttagactttcaatagcacgttgttctgcttcttccttagaaactccgaaattttgaggtccaaaggcaacatcttctaaaacagtctctgcaaataactgactttctggaaattgaaaaactaaacctactttcttacgaattggttttatgtccttgttctttgattgactggttatgatcgtatcatcaacttgaacctgaccactagtgggtaaataaaggccattcaagagctgcataatagtagatttaccacttcctgtatgtccaataaaggctgtatatgaaccatcttttatcgtcgttgtcaattcaaaaagggcacgcccctcaaaaggagtacccgcttgatagatataacttacattttcgagagagattcccataattgttctaccaattccttttctgtcagatagtcttcacactctatcagacctttatttcttagcttttgagttaataatgcactaaaagggatatccaaacctaagtcaaccaactctgtgcctctactaaatagttcacgaggacttgaaacagactccactttaccttttttcaaaaccaaaacacggtcgctcaaagcgacctcatcgagatcatgagtaattgataaaacagtcattccgtattctttacggatagctttaatagattgaatcaattcctggcgaccttctgggtccagcatgctagttgcctcatccaaaatcaaaattgatggtctcatagctacaatacctgcgatagccacacgttgtttttgacctccagataatctagctggctctctatccttaaattctgacattcctacaaattccagagcctcttgaactcttgaagccatttcttcatagggaacacctttattttcaagaccaaaagcaacatcgtcttcaacagttgccccaacaaattgattatctggattttgaaagaccatgccaatcttatcacgaatatcccagacattctcttctgttaattcttgaccatcaacgataatctgcccagactctgccactaatagtccgtcaataagacgtgctgtcgtggattttccagaaccattatgccctacaatggatagccactccccacgtttcacgtgaaacgatacatcatcaagaatataggatggttgatcttgatgatatttaaactttaaattttttatttcaatcatttgtttatcgtactacttgaaagtatccttaaataagaaacctgcacctttgaaataatcatagcctgagtaaattgtaaagaacaaagcgatataaagcataattgttccaataaaatgcaaatgacacaataatagaatgatagataacatctgagtcactgtcttaatcttaccaggcatagctgcagcgagaactgtacctccgttttccactaataaaagacgaagacctgtgactgcaagctcacgacagataataactgaaactacccaggatggcgcttgattaatacctactagcataataaaagctgacattaccaacattttatccgctaatggatctgcaaatttcccgaaattagtaacaacatgccattttcgtgccaaatagccatctaaataatctgtaatactggcaatagcgaagacaaccgccgcagcaatatgcatgacattacttgacgcaagtgatgtcatcagtaaaaagataggaatcaaaacaattctagcaagtgtcaataaattaggtaaattttcttttttaaacatttcttctcgattctattggattcttaatgtgaggtagctaggtgtatttttatctaattgagataaatcaagtgactccccatttacctttagagttacttttgaagattgagcaataataatttgagttggtttagttttatcagaaaaatctaaagagtattttgaatttttcgtttttgaaaggaggtaactctctgaagtatctgagttatctactgaaaaccatgtgtcatcgctatcttttgataactccacatctaaaactactgaagaatttacattggagaaatcaaccattagctgatttccttgagttgtcgttgttacatttgcccccgaaacggtaacctcagaaatgcttcgtgacgatttagccttactagccgttgatagatgattaactgtagagataatattcggttttatcacctgaggttgattagaaagatgtctaataataatataacctactgaacaaatgataagcaacgaaaccgcactaagaattagtaaaggtagatagttagactttcttttttcttcacgtttatgctttaaaaagcgtgacataggagctttggtagctaagctttcttccttacgttcaactggtttcttttctttttttagtttttgctcgttctgtctctgctcctcaaacagacgctttccatctaaaccaaccgaagtggcatacttttcaagcgcttcttgctgaatgtcctctggcaaagctttaagttgatccatttccatagccagaagaaactgagcttcgactccagaaattttttctacatcatataaacttaattctttctttatacgtgctgcacgtaattgctcacctagagagtgtaacttcatttttcccctttctaatattcttctttgttttcgtgtctctattatagcaaataatcacttatttagggaagacaacaaaatcggtaatctctatatttgagagataatgattcaaaaaatccttcaaatccttggaagtaatgctcatcagttcctgaccaaaatcaaagtatgttttatcattctcaaaataagctaaatactgacttcctaaattctggatattatctagactacgtaaaaattcaccatacaaagctttcttttgcaaatccaatgcctcatccgtcaacagtctttttttatctgccgacgtcatcacttgacgaattaaacttgacatacggataggttctgcagtgtccatagtcataatgacaaatgaatatcgattagatacttcgtattcaattgacacagactcatctatttttccttcagcataccaattttgataataaggagacgtccagccaaacagtaaattaaacaataactgtaccattatgttttctctcatacgattatcagtaaaaggaacactcttaaaaccaatggctagctttgagatgaaaatctccatttgaagactatctaatttttggatatctgactcaatcgggttcttttctttttcaactatactctcaggtagtgtaaactcactttgtttttcattgacaaaagtgtaaatatcttcaacatcaaaatcacctaccaaaacgagatgacagtttgctggtttgtaaaagcaatcaaaattatctttcaaatcctttacagtaattttttcaatgctatcaacacttccagcaatgtcttgccctaatatagtattgggatacaaactttgtaaacaacccagatatactctataatcaggatcatcctgatacatatttatttcttgttcaataattcttttttcatggttgacagcatcttcggaacttgtaaacttcgatgtaaactttaataaaagttctaaagactcctcaaagtgatcaagggtagagaaataatatgttgtcttatccaaggttgtaaaagcattgacatcagctccaagcttgacaaaatccaatgtcacatcccttccctgctcatcctcaaatagcttgtgttccagaaaatgagcaatacctgcaggataagattgtaactcaccatcaatataaaagtgattatctagcgccccaaaattcgttgacaaaaaggcggctttttctaaaaatccttttttcttaataattgataaagacataccattatctaaaattgctgaataaacttcttcatcaattttttgataataacgtttcttcaaagcagccattctaagacactccttctaaaaagaacaaactctgtagcttaacttgacgcgctacacggcaaacatcttttttagtaaccttctcaatctcatctaaccaattctctaatgaaagacttttatcgccaaaaatcaccttattaaaacgttgttccaccaatgttaaggcatgatcttcagagagtagggcattcattcgtatgatttttttggtttgattcaggagagaacttgaaaaacgtcctaatttaatataattcaattctctactaattcctcgcatagcctgatttctattagatttttcaattccagcgtaaacttctagtaaacctgtaaagacatcaaattgactactaattgaataagccaatccttccttttctcgaagcgttgtaaataaagcagagtgggcaaattcaccaaacatggcattgaatacaattaaagcaaagtaatctttatctccatattgacatgaaaattggtaccctaattgtaaaatagattgactactctgtctaggttctatcttttctttcaccacattgacataaggttgactatagctaaactgtaaatcaaattgacgtccctccaaaggaaaacgatgtaaaccttggagcacttgataatcatcaaattctccaaccataaagatatcaatacgatctcttgtcaacatactttgaaattcttgataagctgtaaacgaagtctcgacttcaacaagttctgcttgaccatatttgggaactttcaagccctcatttacaaaataaagctctcttcccttaacttcactgtaatagtaattattctctgtgtcaacatcaaggtaggtctttaaattttgtttctctatatcaaatactttattttggtattgagctactcttgacagtggcttgtaaagacactctttcaaaaatcctagaacttcccaaaataatccattattcgtagggataaaggcatctttcaggtacgtcaactctatgtcaacactatgtgtcaaccctttagttaacactctagttgacaactgtgttccataaagagaagctaatctctctttaaaagactgtactgttggatacgtctgattggctgtagccaacatttgtgaaaccagagctcgtttagcaattgtttgtttattcaaagaacctgtcattcgaaaaacaatacgattaattttatatttttgtgttggaatgaagtgtacatagacaccatcagcaattttcattgataacctctaaaaagtttatgcttccaattataccatttttatgctatcttatctcaagagaaagttgaggtactatggaatataaattatttgatgaatacatcacactgcaggcacttttaaaagaattaagtatcattcatagtggcggagctattaaaggttttttagctaacaataccgttttattcaatggtgaggatgaaaaacgtcgtggaaaaaaacttcgttatggggatgttattactattccgtctgaggaacttgaaataacgattatagctcctacaacaaatgaaattgaagagcatcaaaaagaagtcgctgaaaaagcacgtgttgctgccattgttaaaaaaatgaatcaggataataaaaagaaacaaaaggcacatccgtcaaaagaaggcaataaaactaaacgaaaacccgttcgtttcccaggaacctaactatgtggctcgaaaatattgatattcaacactttagaaattatactgaagcctctgtgagcttctcacctcatctcaatatttttcttggtcgcaatgctcaagggaaaacaaatattcttgaggccatctattttctagcattgacacgtagtcatcggacccgttcagataaggaactgattcaatttcagcaatatactctcaaactgaacggcatcgtgcatcgtcatagtggaaagctacctctggaaatcagtttatctaataaaggccgcataacaaaggtcaaccacctcaaacaagctaaattatccgattatatcggtcacatgacagtggtactctttgctcctgaggatttacaacttgtaaagggatctccaagcctaagacgtaaatttatagatattgatttaggacagattaagcctgtttacctttcagacctatcaagttataatcatgtactcaagcaacgtaatgcttatctcaaatctactgacaatgtagacattaattttctctcagtgttagatgaacagctttccgattttggagcacgcgttatcgaacatagactagaatttatcaagcaattagaggaagaggcagatagacatcatagtaatctctcaaatcagatagagcgccttaaaatctcctacgaatctaatataccattcgggaataacaaagttattcgtgaatcatttttaaccacgttaaagcaaaatcacaaaagggatatcttcaaaaagaacactggtgttggtccacatagggatgatttgacattttacattaatgacatgaacgcatctttcggcagtcaggggcaacaacgtagtctcattctttctttaaaaatggctgagattgctctgataaaaaaagtaacaggtgaatttccaattcttctcctcgatgatgtcatgagtgagcttgacaatcaccgtcaactcaaactgttagaaagtattgacgaagaggttcaaaccttcatgacgacaacttcacttgatcatctgagtaacctaccacccgatttaaagaccttcttagtcaagaatggtattatttgtgaaaaacaagtcgattaagcgacttgtttttctgttttctgtgctttacatatatgacaggtgatgtaaaaaagagtgtaaacaaaaactcacccaaaccctttgttaacaattttgtttgtgtaaatatattgtaaacctctgtaaaaaccaatgtaaagaaaaagtacttacctgaagtaagtacttttttgtttttttaatgagctgagtagttgggcgcctcgtttgtaatttgaacatcgtgagggtgactttcaataagtcctgcacctgacatttcaacaaactgagctttgtcatgtaaagcctggatatcttctgcacctgtataacccatacctgcacggataccgccaatcaattggaatacgatatcagcagcagaacctttataagctacacggccttcaattccttctggaacaagtttattcgcttcattaactgcaccttggaagtaacgatcgcttgatcctttcttcatcgctgcaattgatcccataccacggtaagatttgtatttacgaccttggaaaatctcagtttcacctggtgcttcatcagtaccagcaaacatagaaccaagcattacagcattaccacctgctgcaagagcttttacaatatcacctgagtatttgataccgccatcagcaatgattgtttttccgtattcacgcgcaacactagctgcatcgtaaatagcagtgacttgaggaacacctacacccgcaaccacacgtgttgtacaaatagaacctggtccgatacctactttaacaacatcgacacctgcttcataaagtgcacgcgcaccttcagctgttgcgatatttcctgcaatcaaagtacggtctgggaagtgggcacgaatttcagcaattttacgaagaacacctgctgaatgaccatgtgcagtatcaatgacaatagcatctgcgcctgcttcaaagagagcttctgcacgttcaaaggtatcagaagtaacacctacagcacctgctaccaaaagacgaccgaactcatccttagctgcattaggaaactcgataactttttcgatatccttaatagtaataagtcctgacaaacgaccttcttcatcaactagaggtagcttttcaatacgatgctcatgaagaatactttcagccgtttctagatctgtttcaactggagcagtgaccaatttctcagaagtcatgtgttctgaaattggagtatcgtaattagagataaaacgcatatcacggtttgtgataataccaaccaatttacgattttcaagtgtctcaacaattggaacccctgagatacggtaacgctgcattaactcttcagcttcagcaactttattttcaggcgttaggaagaatggatcaatgatgacaccattttcagagcgctttacttttcgaacttcttcagcttgttccgcaatagacatgtttttgtgaatgacacccaaaccacctgcacgagcaattgagatagccatcttactatctgtgaccgtatccatggctgcagtgataattgggatatttaatgtcaaatttttagccaatttcgtcttcaagttgacgttgtttggtagaacatgactttccgcaggaataagcaatacgtcatcaaaagtgtaaccttttttcaagaatttagtgtcccaatttgacattataatcgtcctcttttctcaaagtttggaggtacagaaaccccagtctattttttaattgataatatcatatcatgctaaaatgatttgtcaacagatttcgcataagattctaagaaaacctttttccaaataaaaatagggctccagattatcttgagtccctactttttatttcttagaaataattaattcccattgcttcttttacttctgccaatgtttgtccagcaacttcacgcgctgcttgactacctttttcaagcatacggaaaacttctcccatatccttggcatactctaaacgacgttcacgaattggagctaactcacgttctaagatttctagaagataacgttttgtcttcacatctcctaaaccacctcgttgataatgttctttcatttcagcaattgtagtagcatcctcttcgcgaccaaagatatcaagataatggaaaaccatattaccttcaatttggcctggatcttccacacgaatatgatttggatccgtatacatgctcatgacttttttacgaacagtgtcctcatcatctgaaaggaagataccattacccaaggatttagacatcttagcattaccgtctagacctggaaggcgtcctgcagcttcattttcagggtagatcccctctggctcaaccaaaatatcacaattataagtatgattgaagctacgtgcaatttcacgtgtctgctcaatcattggcttttggtcattacctacaggaacataatttgctttaaaggccgtgatatcagctgcctgagaaattggataaactagaaatcctgttggaatcgattctccgaagcctttttgagcaatttccgtcttaaccgttgggttacgctctaaacgtgccaatgaaactaggttcatgtaatacatagtcaactcagccaactcaggaatctgactttgaatgaaaatagttgacttcgctggatccaaacctacagagagataatctaaagcaacattcccaattgattctttgatgatctctgactcttttgcgtgatccgtaagagcttgctgatcagccaagaagacaaacatgttatatttatcttcgttttgtaaaaggacacgattttttaaactaccaacatagtgtcctagatgaagtttccctgttggacggtctcccgtcaaaataataggtttcgtcatataattacctctctaatacaaaaaaatccccacgcaaaaacatgcgtgagggcgttaatcacttttgatacgcggtaccacctcagttgataactctttctgcagctatcatctcaaaccttctcaacaaagaagttgcacaataaggggtgccaaacctaacgtttatgtgttcacgttaatcgtcaattctcttcagcccattcattccaccttcatactggtttgcagctaccaccagctctctataaaaaaggtaagaattactcttctgatgactattattctacattgttttatctatttttgtcaaggttatgtttccagtttcacgtgaaacacaacctcatattcaaccaaaatagtcattacttgacggaaacttaaaaagacttgataataagaatatcatatctaggagataatatatgaaacgtcgaataatagacatacttttagttacaatcggttcttttatagctgctgtcggctataactcacttttagttaagaataatattgcttcaggtggtgtcggagggctagccattagtttaaatgccctttttggctggaataatgctaacttcgtcttagcaacaaccatccctttgttaattttatgttggttctttcttggccgcgaagttctcctaaaaaccttctatgggtctcttgtcttcccaatgtttattaaattaactgagggcttaccgacactcaccaaacaacctttgttggctgctatttttggtgggattgtattagggctaggactaggaatagtcttctatggaaattcctcaactggaggaactggaattatcacacaaattctcaacaaatatacgccactcccactaggaatggtactacttattgtcgatggaatcattgtcgcaatcagtgctattgcctttcctcctgatactgttatgtattccattctctcacttggagttgtttctcttacaattgataaaatgatggtcggactcaattcatcacgaaatcttctaatcatttcgcaaaatagtgaacaaatcctaaactacatcactagagtggctgatcgaggagcaacaaaaatcccagttcttggtggacataccggacatgcacaaaatatgattatgactaccttgtcaactcatgaggttccaaaagttcaagaagaaatccaaaaaatagatgaaactgcctttatcgtcattgttcctgcttctacagttatgggacgtggatttagcctccaaaaagattaccaaagagttccaaatgactttatcaatcccttgtaaaatcaattgaaataaagtctaatttctcgtaaaatagtagttaagaataaaaataaaggatattatatgcttactgtatcagatgtatcgcttcgttttagcgatcgtaaactttttgatgatgttaacattgccttcacgccaggtaatacttatggtcttatcggtgctaatggtgctggtaaatccacttttttgaaaattttagctggtgatatcgaaccaacgacaggacacatctctcttggtcctgatgaacgtctttctgtccttcgtcagaaccactttgactatgaagaagaacgcgttatcgatgttgttatcatgggtaatgaacgcctctacgatatcatgaaagaaaaagatgccatctacatgaaagaagatttttcagatgaagatggtgtccgtgctgctgaattagagggactctttgctgaattaggtggttgggaagctgaaagcgaagcctcacaattgcttcagaatctaaatatcccagaagaccttcactatcaaaacatgagtgaattggctaatggtgacaaggtcaaggttctccttgcaaaagcactctttggtaaaccagatgtacttcttcttgacgaacctaccaatggtcttgatatccagtcaatctcttggcttgaagatttcttgattgattttgaaaatacggtcattgtcgtatcccatgaccgtcacttcttgaataaggtgtgtacgcatatggccgaccttgactttggtaaaatcaaactctatgtcggtaactatgacttctggaaacaatcttcagaattggctgcacgcttgcaggctgaccgtaatgccaaagcagaagaaaaaattaaggaacttcaagaattcgttgctcgtttctctgccaacgcttcaaaatctaaacaagcgacttctcgtaagaaaatgcttgataaaattgagctagaagaaatcgtcccatcaagtcgtaaatacccatttatcaatttcaaagcagagcgtgaaatcggtaatgaccttctaacagttgaaaatctcactgttaagatggatggtgagactattcttgacaacattagtttcatcttgcgaccaggagataagactgccatcatcggtcaaaacgatattcaaacaactgcattaattcgtgctcttgccggtgatattgactacgaaggtacaatcaaatggggtgttactactagccggtcttaccttccaaaagacaattctaaagactttgcatccggtgaatcaattctcgaatggcttcgtcaatttgccgaaaaaggtgaagatgatgatactttcttgcgtggattccttgggcgtatgctcttctcaggggatgaggttaataaatctgttagtgttctctcagggggagaaaaggtacgtgtcatgctttctaaactcatgcttttgaaatctaacgtccttcttctggatgatcctactaatcacttggatttggaatcaatctccagtctgaatgatggcgtccgtgacttcaaagagtctgttatctttgccagtcatgaccatgaatttattcaaacaatagcgaaccacatcgtagttgtttctaaaaatggggttattgaccgtattgatgaaacttatgatgagttccttgaaaatgaagaagtgcaagctaaagtcaaagcactatgggctgattaaactataaaaagatgcaggttgggatatcccaacctgtcttagtatcattatgacaaataaaaaataccatacgactttattattttatctggctgcttttttcttgcccgtactaatcatgataggggtgctgtatagccaaaaaatctatcctggtagtgagcggactattttaacaagtgatggttttcatcagtatgtgatttttgcaactggacttcggaatatacttcatggaaatgggagcctcttttacacctttacaagtggtctagggcttaatttctatgctctaacaagctattacctaggttccttcttgtctccactttactatttctttactgtcaaccaaatggccgatgctttttattatataacactccttaaattcgggcttattgggttatcaggagcttttagttttaagcggctctttacaaaagtgtcaagaagtttcatcctatgtctttctacaggattttctttgatgagcttcgctaccagtcagttagaaattaatacctggctagatgcctttattctagcacctctaatcatattaggtttacacctcttactaagattcaataaacggggcttatacttttttagcctaacctgtctttttatccaaaattactattttggttatatgatggctattttcctaaccctttacaccatagtacaattgataactatcaagggatggaagagtaagattcttcatttcatagactttggaattgtttctatacttgctggtttaagtagtgctgtcatgttactgcctacactacttgacttgaccacacatggtgaaaagtttacaggtgcgtcaagtttgttgacagagtccacctattattttgacttctttgcgaaaaatctcgttggagtttacgatactactaaatttgggtcaatacctatgatctatgtgggaatcttacctttgattctttttctacttttctttattagtagggaagtcaagctatcattacgtataggttatctcctattagtagctttctttatcgctagcttctacttacagcctcttgatttgttttggcaaggaatgcatgcacccaacatgtttctccatcgctattcttggctcctatctctcctaattgttcttttggcaggagaaacactcaaccgaattaaaaacttttcttttaaaagactcctcatatctttcttaggattgagtaccgcttacttactaacttggattttccaatctcactatagcttcattgaatcagtctcctggctattaagcctagcatttcttctagcctatgccattctatttattagctattttagacagcaaattcctgggagtgtttttcgctgtttcaccttcttgttctgcatttttgagcttgcattaagtacttactatgttgttggagctctgggaaatgagtgggtattcccaactcgtgaaggctacctacgaaatatgtctgccattacaaaactagtttcagatactaagcaagcgaataagactttttaccgtactgaaaggttagaggctcaaactggtaacgacagtatgaaatttaactataatggtatttctcagttttcatccattcgaaatactgcttcaagctcaacactcgataggttaggcttcaaatctgaagggactaatttaaacctacgttaccaaaataacaccattatcgctgatagtctcttcggaataaaatataatttatcgaactttgaccttaataagtatggttttaatcacgtaacttctgagaaaacaatggggctttatcaaaataataatgcaagtcagcttgctatcttaactgatggcatttacaagaatattgacttcactgtcaatacgcttgacaatcaaactagcttgctaaatgctctatctggacttaacttaacctattttaaacgagctccatctcaactttttgatcaagatgctaagtctttgaatcagcgcgtggctaaaaacgttagtaactcgaataaagattttgtaacaatcacctatcgagtcatcgctccaccacatagtcaactctatgttagtgttcctaatatttcttggtccgatgacaataaccactctctgtcaattactgtaaatggtgtgacaaggaatcaagttactgacaataccttcgatttcttcgatcttggctactttgaaacagaatcaatggttaccatcaaacttagttttcctggcaataaagcaatatcttttgataatcctagtttttatgcccttgatactcacaactatcagatagctatggatactattaatgaacgtgatagcaaggttacgacgtcaaataataaagtgttcgttgattatagtagtaaaacgaatgcctcactattcttcaccattccatacgataaggggtggacagcgactataaaccataaaaaagttaagattcaacgagcccaaaaggggttcatgaaagttgatgtccctagtgggaaaggtaaagttgttctaaccttcattccctatggtcttaagacaggtttagtgattagtctattggcaagtatcatattttgttgctacgcttatttcatcagaaaaataaccgttattcaaaaacgctgattatcttaaattaaataggtctggaacaattgttccagacctatttatctttgggtacaaaaaaactcaagctatacaacttgaggtgtcttatcactccgccagtaggactcgaacctacgacatcatgattaacagtcatgcgctactaccaactgagctatggcggataaaactgctaagtagcaaaaatagtccgtacgggattcgaacccgtgttaccgccgtgaaaaggcggtgtcttaaccccttgaccaacggaccaagttctgagatttttatctcgttaacactcttattattatatcagagtattcgattttgtctatactttttttcaaaaaaaatattaaattttgctaaatttattcgaattttacgttagtttttatcttgcttttacaaagtattgacatgttgctatatattttgtaaactaatagagttattggtcccatagctcagctggatagagcattcgccttctaagcgaacggtcgcaggttcgaatcctgctgggatcagataaaaaacgcaatctagaacctctagttgcgtttttgttttgcctcgataaataggaaataatttaaaataaacaaaggaagcaaagtcgtatataggctgtattcatgtaaatattgagcaaaccaagttgaggctgcaactcctaccataaatgtaaagatgataatagtagtataagaagcttgtttaagcactttgggatcaccctcgtcaatagccctagcaacggttaaagaggtattcgtaatatttccagtcatcatgaaggaagcataatttacccctctaacacgcttaaaaatacctacttgaagagaggcaaagaaggccaagcccgcaatcgtaatagtagaatcaacgtaaggtgtaataatggcgagaatagtcattaagagaaaggcaagtctaatcgcttgcaaatgccatccccatttatggttaatgagccacttcttaacaaaaaaaacaaaaaactgacctaaaacaaagaaaaaaataggtatcacatagctgaaagctcttgcaatatgcccctcaacaagatgaataaccaaataaaggagattacctgtctgaatacttgcaaatcgtccgtcttgagtattgtaagtataggcatcaatgaagccccctatataacttactagagttgctacccgtaatccttcaaaaacacgataggagcgttttttcattctgaacatgtctgtttccttcttctacttatggtaaggacttccctgctgaatcatgaatgcgcgataaatttgctctactaatacaaggcgcataagctgatgagggaacgttaagagaccaaaactcattaattgattagccctctttttcactgtaggagagagtcccaaacttccccctataataaaagtaatatctgaatagcctctaagagtcgcttgctctaactctttagcaaattgctccgagggaaattgttttccttcaatagctaaggcaatgacataatcacgattacctaccttagccaagatacgctgcccctctttgtctaggatagctttattttcagcttcgcttgcattatctggcgtcttttcatccgttaattctatagactcaaattttgtaaagcgtcctagtcgtttgacatactccgcaatgccatctttcaaatatttttctttcaattttccaacggtaatcaatttaactttcataggcttattatagcatatatccacaatcttttaacaccttatccacacctttttactgttaagaatctttagttatccctataaaatagcttcttatctacactttttgaaacttatccacagactgttgataactgttttttaaaatcactttatgatataattaagcttactttgatatgtttatcaaaaaggaggactaaacgtgaaaaaatttaactggaaaaaaatagtagcgccaattgcaatgcttgttattggcttactaggtggtttactaggtgcctttatcctactaacagcagcaggggtatcttttaccaattcaacagatacaggtgttaaaacagctaagaccgtatacaataatacaacagatacaactaaagctgttaagaaagtacaaaatgccgttgtttctgtcatcaattaccaagaagggtcatcatcagattctctaaatgaactttatggccgtatctttggtggagatgatagttctgattctagtcaagacaaatcaaaagattctgatgggttgcaagtcgctggtgaaggttctggagtcatctataaaaaagatgggaaagaggcctacatcgtaaccaacaaccacgttgtcgatggcgctaaaaaacttgaaatcatgctttcagatggatcaaaaattactggtgaacttgttggtaaagatacttactctgacctagcagttgtcaaagtttcttcagataaaattaaaaccgtagcggaatttgcagactcaaactctctcacagtcggcgagaaggcaattgctatcggtagcccacttggtaccgaatatgccaactcagtaacagagggtatcgtttctagccttagccgtactgtaactatgcaaaacgacaatggtgaaactgtttcaacaaatgctatccaaacagatgctgccattaaccctggtaactcaggtggtgccttagtcaatatcgaaggacaagttatcggtattaactcaagtaaaatttcatcaacgtcagcagtcgctggtagcgccgttgaaggtatgggatttgccattccatcaaacgatgttgtcgaaatcatcaatcaattggaaaaagacggtaaagttacacgaccagccctaggaatctcaatggccgatcttaacagcctttctagcagtgcaacttctaaattagatttaccagatgatgtgaaagctggagttgtagtcggcagcgttcaaaaaggtatgccagctgacggtaaacttcaagaaaatgatgttatcactgaaattgacggtaaggaaatcagctcaaaaactgatattcaaaccaatctttacagccatagtattggagatacaatcaaggtaaccttctatcgtggtaaagagaagaaaactgaagaacttaaattaacaaaatctacagaagacttgtctgactaagtcattgacaaatctgtcaaaagacctttacaataatgtaaaggtcttttttggaaaggaataacatgcaagaacaactcaaagctttacctattagtgacatctatcccaatccttttcaacctcgtatagagttctctgatgaagaattagcggagctaagccaatcgattgcagaaaatggactaatacagccaatcattgtccgaaaatcggatattattggttatgaactaattgctggggaaagacgtttacgtgcctgtaaacgtctaggaatgacagaaatccctgcagttgtaaaggaagttacagatcaagagagtcgtaaacaagctattattgaaaatttacaacgatcgaatctcaatcccattgaagaagcaaaggcctatcgtagtttaattaatgagctagcttatagtcacgaggaactggcgaaagctatggggaaatccagaccttatatcagtaacgctctcagactcctccaacttccccaagagatacagacgagtatcgaaaatggcaaactgagtcaaggacatgctagagcacttttagctgttgaggatacaaaaaagcaattaactatctatcatcaggtccttactgaaaaatggtcagttcgtaccctggaaaaaagacttcaagaacttccaaaaaaacaaaaatcaaaaaaagatattcatataaaagataaagaaaaagaactggaaaaatcacttggtctccccgttactcttcgttatcacaaaaatcactctggaactattcagatccacttttcgacggaagaagattttaacagaattatcaacaagcttatttgacctgtgaattgaggagaaaaaagaaacaaacttatccacatcataaaatggttgccctccctttatttgagagggtttctttttttattcacaacttgtggataactcttgtgcacaatgtgaattgtctttttttccttgtggataacttagggaacttttatcttcggacctgtggaaaacttttttgttttatgatagaatcagagaacaagaataaagaaggagaattgatgga

SEQ ID NO: 14 - DNA, 3944289 bp, Blautia wexlerae; identical to SEQ ID NO: 12
  source 1..3944289: mol_type = genomic DNA
